(19) United States
(12) Patent Application Publication
(10) Pub. No.: US 2016/0024159 A1
(43) Pub. Date: Jan. 28, 2016

(54) POTENT AND SELECTIVE INHIBITORS OF NAV1.7

(71) Applicant: AMGEN INC, Thousand Oaks, CA (US)

(72) Inventors: Justin K. MURRAY, Moorpark, CA (US); Jerry Ryan HOLDER, Simi Valley, CA (US); Malgorzata WANSKA, Oak Park, CA (US); Christopher M. TEGLEY, Thousand Oaks, CA (US); James R. FALSEY, Moorpark, CA (US); Elizabeth M. DOHERTY, Thousand Oaks, CA (US); Leslie P. MIRANDA, Thousand Oaks, CA (US); Kaustav BISWAS, Agoura Hills, CA (US); Bin WU, Thousand Oaks, CA (US); Kelvin SHAM, Thousand Oaks, CA (US); Jason C. LONG, Newbury Park, CA (US)

(73) Assignee: AMGEN INC., Thousand Oaks, CA (US)

(21) Appl. No.: 14/773,756

(22) PCT Filed: Mar. 12, 2014
(86) PCT No.: PCT/US2014/025062

§ 371 Date: Sep. 8, 2015

Related U.S. Application Data
(60) Provisional application No. 61/778,331, filed on Mar. 12, 2013.
(60) Provisional application No. 61/944,462, filed on Feb. 25, 2014.

(51) Int. Cl. C07K 14/435; A61K 38/17; A61K 47/48

(52) U.S. Cl. CPC C07K 14/43518; A61K 47/48438; A61K 47/48284; A61K 38/1767

(57) ABSTRACT

Disclosed is a composition of matter comprising an isolated polypeptide, which is a peripherally-restricted Na_{V}1.7 inhibitor. In some disclosed embodiments, the isolated polypeptide is an inhibitor of Na_{V}1.7. Other embodiments are conjugated embodiments of the inventive composition of matter and pharmaceutical compositions containing the inventive composition of matter. Isolated nucleic acids encoding some embodiments of inventive polypeptides and expression vectors, and recombinant host cells containing them are disclosed. A method of treating or preventing pain is also disclosed.

[0001] This application claims the benefit of U.S. Provisional Application No. 61/778,331, filed on Mar. 12, 2013, and U.S. Provisional Application No. 61/944,462, filed Feb. 25, 2014, which are both hereby incorporated by reference in their entireties.

[0002] The instant application contains a Sequence Listing which has been submitted electronically in ASCII format and is hereby incorporated by reference in its entirety. Said ASCII copy, created on Jul. 21, 2014, is named A-1779-WO-PCT_SL-072114.txt and is 1,291 kilobytes in size.

[0003] Throughout this application various publications are referenced within parentheses or brackets. The disclosures of these publications in their entireties are hereby incorporated by reference in this application in order to more fully describe the state of the art to which this invention pertains.

### BACKGROUND OF THE INVENTION

[0004] 1. Field of the Invention

[0005] The present invention relates to the biochemical arts, in particular to therapeutic peptides and conjugates.

[0006] 2. Discussion of the Related Art

[0007] Voltage-gated sodium channels (VGSC) are glycoprotein complexes responsible for initiation and propagation of action potentials in excitable cells such as central and peripheral neurons, cardiac and skeletal muscle myocytes, and neuroendocrine cells. Mammalian sodium channels are heterotrimers, composed of a central, pore-forming alpha (α) subunit and auxiliary beta (β) subunits. Mutations in alpha subunit genes have been linked to paroxysmal disorders such as epilepsy, long QT syndrome, and hyperkalemic periodic paralysis in humans, and motor endplate disease and cerebellar ataxia in mice. (Isom, Sodium channel beta subunits: anything but auxiliary, Neuroscientist 7(1):42-54 (2001)). The β-subunit modulates the localization, expression and functional properties of α-subunits in VGSCs.

[0008] Voltage gated sodium channels comprise a family consisting of 9 different subtypes (Na_{V}1.1-Na_{V}1.9). As shown in Table 1, these subtypes show tissue specific localization and functional differences (See, Goldin, A. L., Resurgence of sodium channel research, Annu Rev Physiol 63: 871-94 (2001); Wilson et al., Compositions useful as inhibitors of voltage-gated ion channels, US 2005/0187217 A1). Three members of the gene family (Na_{V}1.8, 1.9, 1.5) are resistant to block by the well-known sodium channel blocker tetrodotoxin (TTX), demonstrating subtype specificity within this gene family. Mutational analysis has identified glutamate 387 as a critical residue for TTX binding (See, Noda, M., H. Suzuki, et al., A single point mutation confers tetrodotoxin and saxitoxin insensitivity on the sodium channel II″ FEBS Lett 259(1): 213-6 (1989)).

TABLE 1
VGSC family with rat TTX IC₅₀ values.

| | | TTX | |
|---|---|---|---|
| VGSC | | IC₅₀ | |
| isoform | Tissue | (nM) | Indication |
| Naᵥ1.1 | CNS, PNS | 10 | Pain, Epilepsy, |
| | soma of | | Neurodegeneration |
| | neurons | | |
| Naᵥ1.2 | CNS | 10 | Neurodegeneration, Epilepsy |
| | high in axons | | |
| Naᵥ1.3 | CNS, | 2-15 | Pain, Epilepsy |
| | embryonic, | | |
| | injured nerves | | |
| Naᵥ1.4 | Skeletal muscle | 5 | Myotonia |
| Naᵥ1.5 | heart | 2000 | Arrhythmia, long QT |
| Naᵥ1.6 | CNS | 1 | Pain, movement disorders |
| | widespread, most | | |
| | abundant | | |
| Naᵥ1.7 | PNS, DRG, | 4 | Pain, Neuroendocrine |
| | terminals | | disorders, prostate cancer |
| | neuroendocrine | | |
| Naᵥ1.8 | PNS, small neurons | >50,000 | Pain |
| | in DRG & TG | | |
| Naᵥ1.9 | PNS, small neurons | 1000 | Pain |
| | in DRG & TG | | |

Abbreviations: CNS = central nervous system, PNS = peripheral nervous system, DRG = dorsal root ganglion, TG = Trigeminal ganglion. (See, Wilson et al., Compositions useful as inhibitors of Voltage-gated ion channels, US 2005/0187217 A1; Goldin, Resurgence of Sodium Channel Research, Annu Rev Physiol 63: 871-94 (2001)).

[0009] In general, voltage-gated sodium channels (Nays) are responsible for initiating the rapid upstroke of action potentials in excitable tissue in the nervous system, which transmit the electrical signals that compose and encode normal and aberrant pain sensations. Antagonists of Na_{V} channels can attenuate these pain signals and are useful for treating a variety of pain conditions, including but not limited to acute, chronic, inflammatory, and neuropathic pain. Known Na_{V} antagonists, such as TTX, lidocaine, bupivacaine, phenytoin, lamotrigine, and carbamazepine, have been shown to be useful for attenuating pain in humans and animal models. (See, Mao, J. and L. L. Chen, Systemic lidocaine for neuropathic pain relief, Pain 87(1): 7-17 (2000); Jensen, T. S., Anticonvulsants in neuropathic pain: rationale and clinical evidence, Eur J Pain 6 (Suppl A): 61-68 (2002); Rozen, T. D., Antiepileptic drugs in the management of cluster headache and trigeminal neuralgia, Headache 41 Suppl 1: S25-32 (2001); Backonja, M. M., Use of anticonvulsants for treatment of neuropathic pain, Neurology 59(5 Suppl 2): S14-7 (2002)).

[0010] The α-subunits of TTX-sensitive, voltage-gated Na_{V}1.7 channels are encoded by the SCN9A gene. The Na_{V}1.7 channels are preferentially expressed in peripheral sensory neurons of the dorsal root ganglia, some of which are involved in the perception of pain. In humans, mutations in the SCN9A gene have shown a critical role for this gene in pain pathways. For instance, a role for the Na_{V}1.7 channel in pain perception was established by recent clinical gene-linkage analyses that revealed gain-of-function mutations in the SCN9A gene as the etiological basis of inherited pain syndromes such as primary erythermalgia (PE), inherited erythromelalgia (IEM), and paroxysmal extreme pain disorder (PEPD). (See, e.g., Yang et al., Mutations in SCN9A, encoding a sodium channel alpha subunit, in patients with primary erythermalgia, J. Med. Genet. 41:171-174 (2004); Harty et al., Na_{V}1.7 mutant A863P in erythromelalgia: effects of altered activation and steady-state inactivation on excitability of nociceptive dorsal root ganglion neurons, J. Neurosci. 26(48):12566-75 (2006); Estacion et al., Na_{V}1.7 gain-of-function mutations as a continuum: A1632E displays physiological changes associated with erythromelalgia and paroxysmal extreme pain disorder mutations and produces symptoms of both disorders, J. Neurosci. 28(43):11079-88 (2008)). In addition, overexpression of Na_{V}1.7 has been detected in strongly metastatic prostate cancer cell lines. (Diss et al., A potential novel marker for human prostate cancer: voltage-gated sodium channel expression in vivo, Prostate Cancer and Prostatic Diseases 8:266-73 (2005); Uysal-Onganer et al., Epidermal growth factor potentiates in vitro metastatic behavior human prostate cancer PC-3M cells: involvement of voltage-gated sodium channel, Molec. Cancer 6:76 (2007)).

[0011] Loss-of-function mutations of the SCN9A gene result in a complete inability of an otherwise healthy individual to sense any form of pain. (e g, Ahmad et al., A stop codon mutation in SCN9A causes lack of pain sensation, Hum. Mol. Genet. 16(17):2114-21 (2007)).

[0012] A cell-specific deletion of the SCN9A gene in conditional knockout mice reduces their ability to perceive mechanical, thermal or inflammatory pain. (Nassar et al., Nociceptor-specific gene deletion reveals a major role for Na_{V}1.7 (PN1) in acute and inflammatory pain, Proc. Natl. Acad. Sci, USA. 101(34): 12706-12711 (2004)).

[0013] Based on such evidence, decreasing Na_{V}1.7 channel activity or expression levels in peripheral sensory neurons of the dorsal root ganglia (DRG) has been proposed as an effective pain treatment, e.g. for chronic pain, neuropathic pain, and neuralgia. (E.g., Thakker et al., Suppression of SCN9A gene expression and/or function for the treatment of pain, WO 2009/033027 A2; Yeomans et al., Decrease in inflammatory hyperalgesia by herpes vector-mediated knockdown of Na_{V}1.7 sodium channels in primary afferents, Hum. Gene Ther. 16(2):271-7 (2005); Fraser et al., Potent and selective Na_{V}1.7 sodium channel blockers, WO 2007/109324 A2; Hoyt et al., Discovery of a novel class of benzazepinone Na(v)1.7 blockers: potential treatments for neuropathic pain, Bioorg. Med. Chem. Lett. 17(16):4630-34 (2007); Hoyt et al., Benzazepinone Na_{V}1.7 blockers: Potential treatments for neuropathic pain, Bioorg. Med. Chem. Lett. 17(22):6172-77 (2007)).

[0014] The α-subunits of TTX-sensitive, voltage-gated Na_{V}1.3 channels are encoded by the SCN3A gene. Four splice variants of human Nav1.3 were reported to have different biophysical properties. (Thimmapaya et al., Distribution and functional characterization of human Na_{V}1.3 splice variants, Eur. J. Neurosci. 22:1-9 (2005)). Expression of Na_{V}1.3 has been shown to be upregulated within DRG neurons following nerve injury and in thalamic neurons following spinal cord injury. (Hains et al., Changes in electrophysiological properties and sodium channel Na_{V}1.3 expression in thalamic neurons after spinal cord injury, Brain 128:2359-71 (2005)). A gain-in-function mutation in Nav1.3 (K354Q) was reportedly linked to epilepsy. (Estacion et al., A sodium channel mutation linked to epilepsy increases ramp and persistent current of Na_{V}1.3 and induces hyperexcitability in hippocampal neurons, Experimental Neurology 224(2):362-368 (2010)).

[0015] Toxin peptides produced by a variety of organisms have evolved to target ion channels. Snakes, scorpions, spiders, bees, snails and sea anemones are a few examples of organisms that produce venom that can serve as a rich source of small bioactive toxin peptides or “toxins” that potently and selectively target ion channels and receptors. In most cases, these toxin peptides have evolved as potent antagonists or inhibitors of ion channels, by binding to the channel pore and physically blocking the ion conduction pathway. In some other cases, as with some of the tarantula toxin peptides, the peptide is found to antagonize channel function by binding to a region outside the pore (e.g., the voltage sensor domain).

[0016] Native toxin peptides are usually between about 20 and about 80 amino acids in length, contain 2-5 disulfide linkages and form a very compact structure. Toxin peptides (e.g., from the venom of scorpions, sea anemones and cone snails) have been isolated and characterized for their impact on ion channels. Such peptides appear to have evolved from a relatively small number of structural frameworks that are particularly well suited to addressing the critical issues of potency, stability, and selectivity. (See, e.g., Dauplais et al., On the convergent evolution of animal toxins: conservation of a diad of functional residues in potassium channel-blocking toxins with unrelated structures, J. Biol. Chem. 272(7):4302-09 (1997); Alessandri-Haber et al., Mapping the functional anatomy of BgK on Kv1.1, Kv1.2, and Kv1.3, J. Biol. Chem. 274(50):35653-61 (1999)). The majority of scorpion and Conus toxin peptides, for example, contain 10-40 amino acids and up to five disulfide bonds, forming extremely compact and constrained structures (microproteins) often resistant to proteolysis. The conotoxin and scorpion toxin peptides can be divided into a number of superfamilies based on their disulfide connections and peptide folds. The solution structure of many of these has been determined by Nuclear Magnetic Resonance (NMR) spectroscopy, illustrating their compact structure and verifying conservation of their family folding patterns. (E.g., Tudor et al., Ionisation behaviour and solution properties of the potassium-channel blocker ShK toxin, Eur. J. Biochem. 251(1-2):133-41(1998); Pennington et al., Role of disulfide bonds in the structure and potassium channel blocking activity of ShK toxin, Biochem. 38(44): 14549-58 (1999); Jaravine et al., Three-dimensional structure of toxin OSK1 from Orthochirus scrobiculosus scorpion venom, Biochem. 36(6):1223-32 (1997); del Rio-Portillo et al.; NMR solution structure of Cn12, a novel peptide from the Mexican scorpion Centruroides noxius with a typical beta-toxin sequence but with alpha-like physiological activity, Eur. J. Biochem. 271(12): 2504-16 (2004); Prochnicka-Chalufour et al., Solution structure of discrepin, a new K+-channel blocking peptide from the alpha-KTx15 subfamily, Biochem. 45(6):1795-1804 (2006)). Conserved disulfide structures can also reflect the individual pharmacological activity of the toxin family. (Nicke et al. (2004), Eur. J. Biochem. 271: 2305-19, Table 1; Adams (1999), Drug Develop. Res. 46: 219-34). For example, α-conotoxins have well-defined four cysteine/two disulfide loop structures (Loughnan, 2004) and inhibit nicotinic acetylcholine receptors. In contrast, ω-conotoxins have six cysteine/three disulfide loop consensus structures (Nielsen, 2000) and block calcium channels. Structural subsets of toxins have evolved to inhibit either voltage-gated or calcium-activated potassium channels.

[0017] Spider venoms contain many peptide toxins that target voltage-gated ion channels, including Kv, Cav, and Nay channels. A number of these peptides are gating modifiers that conform to the inhibitory cystine knot (ICK) structural motif. (See, Norton et al., The cystine knot structure of ion channel toxins and related polypeptides, Toxicon 36(11):1573-1583 (1998); Pallaghy et al., A common structural motif incorporating a cystine knot and a triple-stranded β-sheet in toxic and inhibitory polypeptides, Prot. Sci. 3(10):1833-6, (1994)). In contrast to some scorpion and sea anemone toxins, many spider toxins do not affect the rate of inactivation but inhibit channel activity by restricting the movement of the voltage sensor into the open channel conformation, shifting their voltage dependence of activation to a more positive potential. Many of these spider toxins are promiscuous within and across voltage-gated ion channel families.

[0018] A variety of toxin peptides that target VGSCs, in particular, have been reported. (See, Billen et al., Animal peptides targeting voltage-activated sodium channels, Cur. Pharm. Des. 14:2492-2502, (2008)). Three classes of peptide toxins have been described: 1) site 1 toxins, the μ-conotoxins, bind to the pore of the channel and physically occlude the conduction pathway; 2) site 3 toxins, including the α-scorpion toxins, some sea anemone toxins and δ-conotoxins, bind to the S3-S4 linker of domain IV and slow channel inactivation; and 3) site 4 toxins, including the β-scorpion toxins, bind to the S3-S4 linker in domain II and facilitate channel activation. Both site 3 and site 4 families of peptides alter the open probability of Na_{V} channels and affect gating transitions and are therefore called “gating modifiers.”

[0019] μ-Conotoxin KIIIA (SEQ ID NO:530), a site 1 toxin originally isolated from Conus kinoshitai, is a C-terminally amidated peptide 16 amino acids in length that contains 6 cysteine residues engaged in 3 intramolecular disulfide bonds. It was initially characterized as an inhibitor of tetrodotoxin (TTX)-resistant sodium channels in amphibian dorsal root ganglion (DRG) neurons. (See, Bulaj et al., Novel conotoxins from Conus striatus and Conus kinoshitai selectively block TTX-resistant sodium channels, Biochem. 44(19):7259-7265, (2005)). Later it was found to more effectively inhibit TTX-sensitive than TTX-resistant sodium current in mouse DRG neurons. (See, Zhang et al., Structure/function characterization of μ-conotoxin KIIIA, an analgesic, nearly irreversible blocker of mammalian neuronal sodium channels, J. Biol. Chem. 282(42):30699-30706, (2007)) KIIIA has been found to block cloned mammalian (rodent) channels expressed in Xenopus laevis oocytes with the following rank order potency: Na_{V}1.2>Na_{V}1.4>Na_{V}1.6>Na_{V}1.7>Na_{V}1.3>Na_{V}1.5. Intraperitoneal injection of KIIIA has demonstrated analgesic activity in a formalin-induced pain assay in mice with an ED₅₀ of 1.6 nmol/mouse (0.1 mg/kg) without observed motor impairment; some motor impairment but not paralytic activity was observed at a higher dose (10 nmol). (See, Zhang et al., 2007). Substitution of alanine for Lys7 and Arg10 modified maximal block, while substitution of His12 and Arg14 altered Nav isoform specificity. (See, McArthur et al., Interactions of key charged residues contributing to selective block of neuronal sodium channels by μ-conotoxin KIIIA, Mol. Pharm. 80(4): 573-584, (2011)). “Alanine scan” analogs of KIIIA have identified Lys7, Trp8, Arg10, Asp11, His12, and Arg14 as being important for activity against rNa_{V}1.4. (See Zhang et al., 2007). The NMR solution structure of KIIIA places these residues within or adjacent to an α-helix near the C-terminus of the molecule. (See, Khoo et al., Structure of the analgesic μ-conotoxin KIIIA and effects on the structure and function of disulfide deletion, Biochem. 48(6):1210-1219, (2009)). The disulfide bond between Cys1 and Cys9 may be removed by substitution of alanine (KIIIA[C1A,C9A]) without greatly reducing the activity of the compound. (See, Khoo et al., 2009; Han et al., Structurally minimized μ-conotoxin analogs as sodium channel blockers: implications for designing conopeptide-based therapeutics, ChemMedChem 4(3):406-414, (2009)). Replacing a second disulfide bond between Cys2 and Cys16 with a diselenide bond between selenocysteine residues has given rise to the disulfide-depleted selenoconopeptide analogs of KIIIA These compounds have retained the activity of KIIIA but are more synthetically accessible. (See, Han et al., Disulfide-depleted selenoconopeptides: simplified oxidative folding of cysteine-rich peptides, ACS Med. Chem. Lett. 1(4):140-144, (2010)). The native structure has been further minimized to a lactam-stabilized helical peptide scaffold with Nay inhibitory activity. (See, Khoo et al., Lactam-stabilized helical analogues of the analgesic μ-conotoxin KIIIA, J. Med. Chem. 54:7558-7566 (2011)) KIIIA binds to the neurotoxin receptor site 1 in the outer vestibule of the conducting pore of the VGSCs and blocks the channel in an all-or-none manner. Recent studies have shown that some analogs of KIIIA only partially inhibit the sodium current and may be able to bind simultaneously with TTX and saxitoxin (STX). (See, Zhang et al., Cooccupancy of the outer vestibule of voltage-gated sodium channels by μ-conotoxin KIIIA and saxitoxin or tetrodotoxin, J. Neurophys. 104(1):88-97, (2010); French et al., The tetrodotoxin receptor of voltage-gated sodium channels—perspectives from interactions with μ-conotoxins, Marine Drugs 8:2153-2161, (2010); Zhang et al., μ-Conotoxin KIIIA derivatives with divergent affinities versus efficacies in blocking voltage-gated sodium channels. Biochem. 49(23):4804-4812, (2010); Zhang et al., Synergistic and antagonistic interactions between tetrodotoxin and μ-conotoxin in blocking voltage-gated sodium channels, Channels 3(1):32-38, (2009)).

[0020] OD1 (SEQ ID NO:589) is an α-like toxin isolated from the venom of the Iranian yellow scorpion Odonthobuthus doriae. (See, Jalali et al., OD1, the first toxin isolated from the venom of the scorpion Odonthobuthus doriae active on voltage-gated Na+ channels, FEBS Lett. 579(19):4181-4186, (2005)). This peptide is 65 amino acids in length with an amidated C-terminus containing 6 cysteine residues that form 3 disulfide bonds. OD 1 has been characterized as an Na_{V}1.7 modulator that impairs fast inactivation (EC₅₀=4.5 nM), increases the peak current at all voltages, and induces a persistent current, with selectivity against Na_{V}1.8 and Na_{V}1.3. (See Maertens et al., Potent modulation of the voltage-gated sodium channel Nav1.7 by OD1, a toxin from the scorpion Odonthobuthus doriae, Mol. Pharm. 70(1):405-414, (2006)).

[0021] Huwentoxin-IV(HWTX-IV; SEQ ID NO:528) is a 35 residue C-terminal peptide amide with 3 disulfide bridges between 6 cysteine residues isolated from the venom of the Chinese bird spider, Selenocosmia huwena. (See, Peng et al., Function and solution structure of huwentoxin-IV, a potent neuronal tetrodotoxin (TTX)-sensitive sodium channel antagonist from chinese bird spider Selenocosmia huwena, J. Biol. Chem. 277(49):47564-47571, (2002)). The disulfide bonding pattern (C1-C4, C2-5, C3-C6) and NMR solution structure place HWTX-IV in the ICK structural family since the C3-C6 disulfide bond passes through the 16-residue ring formed by the other two disulfide bridges (C1-C4 and C2-C5). HWTX-IV inhibits TTX-sensitive sodium currents in adult rat DRG neurons with an IC₅₀ value of 30 nM but has no effect on TTX-resistant VGSCs at up to a 100 nM concentration. (See, Peng et al., 2002). HWTX-IV was also 12-fold less potent against central neuronal sodium channels in rat hippocampus neurons, suggesting that it may be selective toward Na_{V}1.7. (See, Xiao et al., Synthesis and characterization of huwentoxin-IV, a neurotoxin inhibiting central neuronal sodium channels, Toxicon 51(2):230-239, (2008)). Testing HWTX-IV against VGSC sub-types determined the relative sensitivity to be hNav1.7 (IC₅₀=26 nM)>rNav1.2>>rNav1.3>rNav1.4>hNav1.5. (See Xiao et al., Tarantula huwentoxin-IV inhibits neuronal sodium channels by binding to receptor site 4 and trapping the domain II voltage sensor in the closed configuration, J. Biol. Chem. 283(40):27300-27313, (2008)). Site directed protein mutagenesis mapped the binding of HWTX-IV to neurotoxin site 4, the extracellular S3-S4 linker between domain II, and its behavior in response to changes in voltage and channel activation is consistent with binding to the voltage sensor of Nav1.7 and trapping it in the resting configuration. (See, Xiao et al., 2008). Huwentoxin-I (HWTX-I; SEQ ID NO:529), a related family member is less potent against VGSCs but is active against N-Type Ca_{V} channels. (See, Wang et al., The cross channel activities of spider neurotoxin huwentoxin I on rat dorsal root ganglion neurons, Biochem. Biophys. Res. Comm. 357(3):579-583, (2007); Chen et al., Antinociceptive effects of intrathecally administered huwentoxin-I, a selective N-type calcium channel blocker, in the formalin test in conscious rats, Toxicon 45(1):15-20, (2005); Liang et al., Properties and amino acid sequence of huwentoxin-I, a neurotoxin purified from the venom of the Chinese bird spider Selenocosmia huwena, Toxicon 31(8):969-78, (1993)).

[0022] ProTx-II (SEQ ID NO:531), isolated from the venom of the tarantula Thixopelma pruriens, is a 30 amino acid polypeptide with a C-terminal free acid and 6 cysteine residues that form 3 disulfide bonds. It differs from other members of the ICK family because it contains only three residues between the fifth and sixth cysteine residues instead of the normal 4-11. ProTx-II is a potent inhibitor of several Na_{V} channel sub-types including Na_{V}1.2, Na_{V}1.7 (IC₅₀<1 nM), Na_{V}1.5, and Na_{V}1.8, as well as Cav3.1 channels but not K_{V} channels. (See, Middleton et al., Two tarantula peptides inhibit activation of multiple sodium channels, Biochem. 41(50):14734-14747, (2002); Priest et al., ProTx-I and ProTx-II: gating modifiers of voltage-gated sodium channels, Toxicon 49(2):194-201, (2007); Edgerton et al., Inhibition of the activation pathway of the T-type calcium channel CaV3.1 by ProTxII, Toxicon 56(4):624-636, (2010)). The “alanine scan” analogs of ProTx-II were tested against Nav1.5, identifying Meth, Trp7, Arg13, Met19, Val20, Arg22, Leu23, Trp24, Lys27, Leu29, and Trp30 as being important for activity. (See, Smith et al., Molecular interactions of the gating modifier toxin ProTx-II with Nav1.5: implied existence of a novel toxin binding site coupled to activation, J. Biol. Chem. 282(17):12687-12697, (2007)). Biophysical characterization showed that ProTx-II differs from HwTx-IV in its ability to interact with lipid membranes. (See, Smith et al., Differential phospholipid binding by site 3 and site 4 toxins: implications for structural variability between voltage-sensitive sodium channel comains, J. Biol. Chem. 280(12):11127-11133, (2005). Doses of 0.01 and 0.1 mg/kg i.v. of ProTx-II were well tolerated in rats, but 1 mg/kg doses were lethal. ProTx-II was not efficacious in a mechanical hyperalgesia study. (See, Schmalhofer et al., ProTx-II, a selective inhibitor of NaV1.7 sodium channels, blocks action potential propagation in nociceptors, Mol. Pharm. 74(5):1476-1484, (2008)). Intrathecal administration was lethal at 0.1 mg/kg and not effective in the hyperalgesia study at lower doses. ProTx-II application to desheathed cutaneous nerves completely blocked the C-fiber compound action potential but had little effect on action potential propagation of the intact nerve. (See, Schmalhofer et al., 2008). ProTx-II is believed to bind to the S3-S4 linker of domain II of Na_{V}1.7 to inhibit channel activation but may also interact with the domain IV voltage sensor and affect sodium channel activation at higher concentrations. (See, Xiao et al., The tarantula toxins ProTx-II and huwentoxin-IV differentially interact with human Nav1.7 voltage sensors to inhibit channel activation and inactivation, Mol. Pharm. 78(6):1124-1134, (2010); Sokolov et al., Inhibition of sodium channel gating by trapping the domain II voltage sensor with protoxin II, Mol. Pharm. 73(3):1020-1028, (2008); Edgerton et al., Evidence for multiple effects of ProTxII on activation gating in NaV1.5, Toxicon 52(3):489-500, (2008)).

[0023] Other peptide inhibitors of VGSCs isolated from spider venoms and peptide analogs were reported in Murray et al., Potent and selective inhibitors of Nav1.3 and Nav1.7, WO 2012/125973 A2; Meir et al., Novel peptides isolated from spider venom and uses thereof, US 2011/0065647 A1; Lampe et al., Analgesic peptides from venom of Grammostola spatulata and use thereof, U.S. Pat. No. 5,877,026; Park et al., Analogs of sodium channel peptide toxin, WO 2012/004664 A2; and Chen et al., Molecular diversity and evolution of cysteine knot toxins of the tarantula Chilobrachys jingzhao, cell. Mol. Life Sci. 65:2431-44 (2008).

[0024] Production of toxin peptides is a complex process in venomous organisms, and is an even more complex process synthetically. Due to their conserved disulfide structures and need for efficient oxidative refolding, toxin peptides present challenges to synthesis. (See, Steiner and Bulaj, Optimization of oxidative folding methods for cysteine-rich peptides: a study of conotoxins containing three disulfide bridges, J. Pept. Sci. 17(1): 1-7, (2011); Góngora-Benitez et al., Optimized Fmoc solid-phase synthesis of the cysteine-rich peptide Linaclotide, Biopolymers Pept. Sci. 96(1):69-80, (2011)). Although toxin peptides have been used for years as highly selective pharmacological inhibitors of ion channels, the high cost of synthesis and refolding of the toxin peptides and their short half-life in vivo have impeded the pursuit of these peptides as a therapeutic modality. Far more effort has been expended to identify small molecule inhibitors as therapeutic antagonists of ion channels, than has been given the toxin peptides themselves. One exception is the approval of the small ω-conotoxin MVIIA peptide (Prialt®, ziconotide), an inhibitor of neuron-specific N-type voltage-sensitive calcium channels, for treatment of intractable pain. The synthetic and refolding production process for ziconotide, however, is costly and only results in a small peptide product with a very short half-life in vivo (about 4 hours).

[0025] A small clinical trial in humans showed that local, non-systemic injection of the non-peptide tetrodotoxin produced pain relief in patients suffering from pain due to cancer and/or to chemotherapy (Hagen et al., J Pain Symp Manag 34:171-182 (2007)). Tetrodotoxin is a non-CNS-penetrant inhibitor of sodium channels including Na_{V}1.3 and Na_{V}1.7; although it cannot be used systemically due to lack of selectivity among sodium channel subtypes, its efficacy provides further validation for treating chronic pain syndromes with inhibitors of Na_{V}1.7 and/or Na_{V}1.3 in peripheral neurons.

[0026] Polypeptides typically exhibit the advantage of greater target selectivity than is characteristic of small molecules. Non-CNS penetrant toxin peptides and peptide analogs selective for Nav1.7 are desired, and are provided by the present invention.

### SUMMARY OF THE INVENTION

[0027] The present invention is directed to a composition of matter comprising an isolated polypeptide, which is a peripherally-restricted Na_{V}1.7 inhibitor. In one embodiment, the isolated polypeptide is a selective inhibitor of Na_{V}1.7, a peptide analog of jingzhaotoxin-V (“JzTx-V”; YCQKWMWTCDSKRACCEGLRCKLWCRKII-NH₂//SEQ ID NO:2).

[0028] Some embodiments, the present invention are directed to a composition of matter comprising an isolated polypeptide comprising the amino acid sequence of the formula:

[0029] Xₐₐ¹Xₐₐ²Xₐₐ³Xₐₐ⁴Xₐₐ⁵Xₐₐ⁶Xₐₐ⁷Xₐₐ⁸Xₐₐ⁹Xₐₐ¹⁰Xₐₐ¹¹Aspₐₐ¹²Xₐₐ¹³Xₐₐ¹⁴ Xₐₐ¹⁵Xₐₐ¹⁶Xₐₐ¹⁷Xₐₐ¹⁸Xₐₐ¹⁹Xₐₐ²⁰Leuₐₐ²¹Xₐₐ²²Xₐₐ²³Xₐₐ²⁴Xₐₐ²⁵Xₐₐ²⁶Xₐₐ²⁷Xₐₐ²⁸Xₐₐ²⁹Xₐₐ³⁰Xₐₐ³¹Xₐₐ³²Xₐₐ³³Xₐₐ³⁴//SEQ ID NO:590

[0030] or a pharmaceutically acceptable salt thereof,

[0031] wherein:

[0032] Xₐₐ¹Xₐₐ² is absent; or Xₐₐ¹ is any amino acid residue and Xₐₐ² is any amino acid residue; or Xₐₐ¹ is absent and Xₐₐ² is any amino acid residue; or Xₐₐ¹ is absent and Xₐₐ² is absent;

[0033] Xₐₐ³ is any amino acid residue;

[0034] Xₐₐ⁴ is Cys, if Xₐₐ¹⁸ is Cys; or Xₐₐ⁴ is SeCys, if Xₐₐ¹⁸ is SeCys;

[0035] Xₐₐ⁵ is any neutral hydrophilic or basic amino acid residue;

[0036] Xₐₐ⁶ is any basic or neutral hydrophilic amino acid residue;

[0037] Xₐₐ⁷ is a Trp, 5-bromoTrp, 6-bromoTrp, 5-chloroTrp, 6-chloroTrp, 1-Nal, 2-Nal, thioTrp, BhPhe, 2-BrhF, 2-C1hF, 2-FhF, 2-MehF, 2-MeOhF, 3-BrhF, 3-ClhF, 3-FhF, 3-MehF, 3-MeOhF, 4-BrhF, 4-C1hF, 4-FhF, 4-Me-F, 4-MehF, 4-MeOhF residue;

[0038] Xₐₐ⁸ is a Met, Nle, Nva, Leu, Ile, Val, or Phe residue;

[0039] Xₐₐ⁹ is a Trp, 5-bromoTrp, 6-bromoTrp, 5-chloroTrp, 6-chloroTrp, 1-Nal, 2-Nal, or thioTrp residue;

[0040] Xₐₐ¹⁰ is a basic or neutral hydrophilic amino acid residue, or an Ala residue;

[0041] Xₐₐ¹¹ is Cys if Xₐₐ²³ is Cys; or Xₐₐ¹¹ is SeCys if Xₐₐ²³ is SeCys;

[0042] Xₐₐ¹³ is any amino acid residue;

[0043] Xₐₐ¹⁴ is a basic or acidic residue or an Ala residue;

[0044] Xₐₐ¹⁵ is an Arg or Cit residue;

[0045] Xₐₐ¹⁶ is any amino acid residue;

[0046] Xₐₐ¹⁷ is a Cys if Xₐₐ²⁷ is Cys; or Xₐₐ¹⁷ is a SeCys if Xₐₐ²⁷ is SeCys;

[0047] Xₐₐ¹⁸ is a Cys or SeCys;

[0048] Xₐₐ¹⁹ is any amino acid residue;

[0049] Xₐₐ²⁰ is a Gly, Asp or Ala residue;

[0050] Xₐₐ²² is an acidic, basic, or neutral hydrophilic amino acid residue, or Ala or Val residue;

[0051] Xₐₐ²³ is a Cys or SeCys residue;

[0052] Xₐₐ²⁴ is a basic or neutral hydrophilic amino acid or Ala residue;

[0053] Xₐₐ²⁵ is an aliphatic hydrophobic residue;

[0054] Xₐₐ²⁶ is a Trp, 5-bromoTrp, 6-bromoTrp, 5-chloroTrp, 6-chloroTrp, 7-BrW, 1-Nal, 2-Nal, thioTrp, 5-phenylTrp, 5-iPrTrp, 5-ethylTrp, or 5-MeTrp residue;

[0055] Xₐₐ²⁷ is a Cys or SeCys residue;

[0056] Xₐₐ²⁸ is a basic or neutral hydrophilic amino acid residue;

[0057] Xₐₐ²⁹ is a basic amino acid residue, or a Tyr or Leu residue;

[0058] Xₐₐ³⁰ is an Ile, Trp, Tyr, 5-bromoTrp, 6-bromoTrp, 5-chloroTrp, 6-chloroTrp, 1-Nal, 2-Nal, thioTrp, 1-Nal, or 2-Nal residue, if Xₐₐ²² is an acidic amino acid residue; or

[0059] Xₐₐ³⁰ is an acidic amino acid residue or a Pro residue, if Xₐₐ²² is a basic or neutral hydrophilic amino acid residue or an Ala or Val residue;

[0060] Xₐₐ³¹ is an Ile, Trp, Phe, BhPhe, Cha, Tyr, 5-bromoTrp, 6-bromoTrp, 5-chloroTrp, 6-chloroTrp, 1-Nal, 2-Nal, thioTrp, or 4-tBu-F residue;

[0061] each of Xₐₐ³², Xₐₐ³³, and Xₐₐ³⁴ is independently absent or is independently a hydrophobic or acidic amino acid residue, or a Ser or Gly residue;

[0062] and wherein:

[0063] if Xₐₐ⁴ and Xₐₐ¹⁸ are both Cys residues, there is a disulfide bond between residue Xₐₐ⁴ and residue Xₐₐ¹⁸; or if Xₐₐ⁴ and Xₐₐ¹⁸ are both SeCys residues, there is a diselenide bond between residue Xₐₐ⁴ and residue Xₐₐ¹⁸;

[0064] if Xₐₐ¹¹ and Xₐₐ²³ are both Cys residues, there is a disulfide bond between residue Xₐₐ¹¹ and residue Xₐₐ²³; or if Xₐₐ¹¹ and Xₐₐ²³ are both SeCys residues, there is a diselenide bond between residue Xₐₐ¹¹ and residue Xₐₐ²³;

[0065] if Xₐₐ¹⁷ and Xₐₐ²⁷ are both Cys residues, there is a disulfide bond between residue Xₐₐ¹⁷ and residue Xₐₐ²⁷; or if Xₐₐ¹⁷ and Xₐₐ²⁷ are both SeCys residues, there is a diselenide bond between residue Xₐₐ¹⁷ and residue Xₐₐ²⁷;

[0066] the amino-terminal residue is optionally acetylated, biotinylated, or 4-pentynoylated, or PEGylated; and

[0067] the carboxy-terminal residue is optionally amidated.

[0068] Embodiments in which one or more of Xₐₐ¹⁴, Xₐₐ¹⁶, or Xₐₐ²² of SEQ ID NO:590 is an acidic amino acid residue are particularly useful.

[0069] In particular embodiments, the composition of matter comprises an amino acid sequence selected from SEQ ID NOS: 63, 69, 110-115, 131, 137, 139-147, 149-150, 152-154, 157, 159-172, 174-175, 177-179, 182, 184-246, 273-274, 277, 279, 284-295, 297-356, 392-397, 406-409, 411-422, 426, 435-437, 439-445, 447-452, 455-475, 518, 520, 521, 523, 524, 526, 527, 546-563, 565-566, 568, 573, 574, 576, 577, 578-588, SEQ ID NO:597, SEQ ID NO:605, SEQ ID NO:614, SEQ ID NO:615, SEQ ID NO:635, SEQ ID NO:636, SEQ ID NO:640, SEQ ID NO:641, SEQ ID NO:642, SEQ ID NO:643, SEQ ID NO:644, SEQ ID NO:645, SEQ ID NO:657, SEQ ID NO:667, SEQ ID NO:687, SEQ ID NO:688, SEQ ID NOS: 692-697, SEQ ID NO:701, SEQ ID NO:702, SEQ ID NO:707, SEQ ID NO:708, SEQ ID NO:709, SEQ ID NOS: 714-718, SEQ ID NO:721, SEQ ID NO:723, SEQ ID NOS: 726-729, SEQ ID NOS: 731-757, SEQ ID NOS: 764-785, SEQ ID NO:789, SEQ ID NO:790, SEQ ID NO:791, SEQ ID NOS: 795-801, SEQ ID NO:803, SEQ ID NO:804, SEQ ID NO:805, SEQ ID NO:807, SEQ ID NO:808, SEQ ID NO:809, SEQ ID NO:814, SEQ ID NOS: 816-824, SEQ ID NO:828, SEQ ID NO:829, SEQ ID NO:831, SEQ ID NO:833, SEQ ID NOS: 835-870, SEQ ID NOS: 873-885, SEQ ID NOS: 888-909, SEQ ID NO:911, SEQ ID NO:912, SEQ ID NO:913, SEQ ID NO:923, SEQ ID NO:924, SEQ ID NO:925, SEQ ID NO:929, SEQ ID NO:930, SEQ ID NO:931, SEQ ID NOS: 941-984, SEQ ID NOS: 986-1033, SEQ ID NOS: 1136-1188, SEQ ID NOS: 1190-1242, SEQ ID NO:1350, SEQ ID NO:1351, SEQ ID NO:1352, SEQ ID NO:1353, SEQ ID NOS: 1358-1369, SEQ ID NOS: 1382-1393, SEQ ID NOS: 1406-1417, SEQ ID NO:1430, SEQ ID NOS: 1432-1443, SEQ ID NOS: 1456-1467, SEQ ID NOS: 1480-1491, SEQ ID NOS: 1510-1515, SEQ ID NOS: 1522-1527, SEQ ID NOS: 1534-1611, SEQ ID NO: 1613, SEQ ID NOS: 1615-1640, SEQ ID NO:1644, SEQ ID NO:1645, and SEQ ID NOS: 1649-1694, as set forth in Table 5; or comprises an amino acid sequence selected from SEQ ID NOS: 63, 69, 112-113, 115, 131, 137, 193-196, 200-203, 207-210, 214-217, 221-224, 228-231, 235-238, 242-246, 277, and 279, as set forth in Table 5, that does not include a non-canonical amino acid.

[0070] Some embodiments comprise useful combinations of mutations to the native JzTx-V amino acid sequence, e.g, Glu residues at Xaa¹⁴ and Xaa³⁰ of SEQ ID NO:590, such as SEQ ID NOS: 715, 728, 732, 735, 737, 742, 744, 746, 747, 748, 749, 753, 754, 755, 756, 757, 835, 836, 837, 953, 954, 955, 956, 957, 969, 970, 971, 972, 973, 974, 975, 976, 977, 978, 979, 980, 981, 982, 983, 984, 1002, 1003, 1004, 1005, 1006, 1018, 1019, 1020, 1021, 1022, 1023, 1024, 1025, 1026, 1027, 1028, 1029, 1030, 1031, 1032, 1137, 1157, 1158, 1159, 1160, 1161, 1173, 1174, 1175, 1176, 1177, 1178, 1179, 1180, 1181, 1182, 1183, 1184, 1185, 1186, 1187, 1188, 1191, 1211, 1212, 1213, 1214, 1225, 1227, 1228, 1229, 1230, 1231, 1232, 1233, 1234, 1235, 1236, 1237, 1238, 1239, 1240, 1241, 1242, 1351, 1353, 1360, 1362, 1363, 1366, 1368, 1369, 1384, 1386, 1387, 1390, 1392, 1393, 1408, 1410, 1411, 1414, 1416, 1417, 1434, 1436, 1437, 1440, 1442, 1443, 1458, 1460, 1461, 1464, 1466, 1467, 1482, 1484, 1485, 1488, 1490, 1491, 1628, 1629, 1673, 1674, 1677, 1678, 1683, 1686, or 1687, as set forth in Table 5.

[0071] Other examples include Glu residues at Xaa¹⁶ and Xaa³⁰ of SEQ ID NO:590, such as SEQ ID NOS: 717, 733, 738, 740, 743, 745, 747, 749, 750, 751, 752, 753, 755, 756, 757, 770, 771, 773, 958, 959, 960, 961, 962, 963, 1138, 1162, 1163, 1164, 1165, 1166, 1167, 1192, 1361, 1367, 1385, 1391, 1409, 1415, 1430, 1435, 1441, 1459, 1465, 1483, 1489, 1596, 1597, 1598, 1600, 1602, 1645, or 1694, as set forth in Table 5.

[0072] Still other examples include Glu residues at Xaa¹⁴ and Xaa³⁰ and a 5-BrTrp residue at Xₐₐ²⁶ of SEQ ID NO:590, such as SEQ ID NOS: 1137, 1157, 1158, 1159, 1160, 1161, 1173, 1174, 1175, 1176, 1177, 1178, 1179, 1180, 1181, 1182, 1183, 1184, 1185, 1186, 1187, 1188, 1191, 1211, 1212, 1213, 1214, 1215, 1227, 1228, 1229, 1230, 1231, 1232, 1233, 1234, 1235, 1236, 1237, 1238, 1239, 1240, 1241, 1242, 1351, 1353, 1360, 1362, 1363, 1366, 1368, 1369, 1384, 1386, 1387, 1390, 1392, 1393, 1408, 1410, 1411, 1414, 1416, 1417, 1434, 1436, 1437, 1440, 1442, 1443, 1458, 1460, 1461, 1464, 1466, 1467, 1482, 1484, 1485, 1488, 1490, 1491, or 1629, as set forth in Table 5. Additional examples include Glu residues at Xaa¹⁶ and Xaa³⁰ and a 5-BrTrp residue at Xₐₐ²⁶ of SEQ ID NO:590, such as SEQ ID NOS: 1138, 1162, 1163, 1164, 1165, 1166, 1167, 1192, 1361, 1367, 1385, 1391, 1409, 1415, 1430, 1435, 1441, 1459, 1465, 1483, or 1489, as set forth in Table 5.

[0073] In some embodiments, the present invention is a subset of SEQ ID NO:590, directed to a composition of matter comprising an isolated polypeptide comprising the amino acid sequence of the formula: Xₐₐ¹Xₐₐ²Xₐₐ³Xₐₐ⁴Xₐₐ⁵Xₐₐ⁶Xₐₐ⁷Xₐₐ⁸Xₐₐ⁹Xₐₐ¹⁰Xₐₐ¹¹Asp¹²Xₐₐ¹³Xₐₐ¹⁴Arg¹⁵Xₐₐ¹⁶Xₐₐ¹⁷Xₐₐ¹⁸Xₐₐ¹⁹Xₐₐ²⁰Leu²¹Xₐₐ²²Xₐₐ²³Xₐₐ²⁴Leu²⁵Xₐₐ²⁶Xₐₐ²⁷Xₐₐ²⁸Xₐₐ²⁹Xₐₐ³⁰Xₐₐ³¹Xₐₐ³²Xₐₐ³³Xₐₐ³⁴//SEQ ID NO:516

or a pharmaceutically acceptable salt thereof,
wherein:

[0074] Xₐₐ¹Xₐₐ² is absent; or Xₐₐ¹ is any amino acid residue and Xₐₐ² is any amino acid residue; or Xₐₐ¹ is absent and Xₐₐ² is any amino acid residue; or Xₐₐ¹ is absent and Xₐₐ² is absent;

[0075] Xₐₐ³ is any amino acid residue;

[0076] Xₐₐ⁴ is Cys, if Xₐₐ¹⁸ is Cys; or Xₐₐ⁴ is SeCys, if Xₐₐ¹⁸ is SeCys;

[0077] Xₐₐ⁵ is any neutral hydrophilic or basic amino acid residue;

[0078] Xₐₐ⁶ is any basic amino acid residue;

[0079] Xₐₐ⁷ is a Trp, 5-bromoTrp, 6-bromoTrp, 5-chloroTrp, 6-chloroTrp, 1-Nal, 2-Nal, or thioTrp residue;

[0080] Xₐₐ⁸ is a Met, Nle, Nva, Leu, Ile, Val, or Phe residue;

[0081] Xₐₐ⁹ is a Trp, 5-bromoTrp, 6-bromoTrp, 5-chloroTrp, 6-chloroTrp, 1-Nal, 2-Nal, or thioTrp residue;

[0082] Xₐₐ¹⁰ is a basic or neutral hydrophilic amino acid residue, or an Ala residue;

[0083] Xₐₐ¹¹ is Cys if Xₐₐ²³ is Cys; or Xₐₐ¹¹ is SeCys if Xₐₐ²³ is SeCys;

[0084] Xₐₐ¹³ is any amino acid residue except a hydrophobic residue;

[0085] Xₐₐ¹⁴ is a basic residue or an Ala residue;

[0086] Xₐₐ¹⁶ is any amino acid residue;

[0087] Xₐₐ¹⁷ is a Cys if Xₐₐ²⁷ is Cys; or Xₐₐ¹⁷ is a SeCys if Xₐₐ²⁷ is SeCys;

[0088] Xₐₐ¹⁸ is a Cys or SeCys;

[0089] Xₐₐ¹⁹ is any amino acid residue;

[0090] Xₐₐ²⁰ is a Gly or Ala residue;

[0091] Xₐₐ²² is an acidic, basic amino acid residue, or Ala residue;

[0092] Xₐₐ²³ is a Cys or SeCys residue;

[0093] Xₐₐ²⁴ is a basic amino acid or Ala residue;

[0094] Xₐₐ²⁶ is a Trp, 5-bromoTrp, 6-bromoTrp, 5-chloroTrp, 6-chloroTrp, 1-Nal, 2-Nal, or thioTrp residue;

[0095] Xₐₐ²⁷ is a Cys or SeCys residue;

[0096] Xₐₐ²⁸ is a basic amino acid residue;

[0097] Xₐₐ²⁹ is a basic amino acid residue;

[0098] Xₐₐ³⁰ is an Ile, Trp, Tyr, 5-bromoTrp, 6-bromoTrp, 5-chloroTrp, 6-chloroTrp, thioTrp, 1-Nal, or 2-Nal residue, if Xₐₐ²² is an acidic amino acid residue; or

[0099] Xₐₐ³⁰ is an acidic amino acid residue, if Xₐₐ²² is a basic amino acid residue or an Ala residue;

[0100] Xₐₐ³¹ is an Ile, Trp, Tyr, 5-bromoTrp, 6-bromoTrp, 5-chloroTrp, 6-chloroTrp, thioTrp, 1-Nal, or 2-Nal residue;

[0101] each of Xₐₐ³², Xₐₐ³³, and Xₐₐ³⁴ is independently absent or is independently a hydrophobic amino acid residue;

[0102] and wherein:

[0103] if Xₐₐ⁴ and Xₐₐ¹⁸ are both Cys residues, there is a disulfide bond between residue Xₐₐ⁴ and residue Xₐₐ¹⁸; or if Xₐₐ⁴ and Xₐₐ¹⁸ are both SeCys residues, there is a diselenide bond between residue Xₐₐ⁴ and residue Xₐₐ¹⁸;

[0104] if Xₐₐ¹¹ and Xₐₐ²³ are both Cys residues, there is a disulfide bond between residue Xₐₐ¹¹ and residue Xₐₐ²³; or if Xₐₐ¹¹ and Xₐₐ²³ are both SeCys residues, there is a diselenide bond between residue Xₐₐ¹¹ and residue Xₐₐ²³;

[0105] if Xₐₐ¹⁷ and Xₐₐ²⁷ are both Cys residues, there is a disulfide bond between residue Xₐₐ¹⁷ and residue Xₐₐ²⁷; or if Xₐₐ¹⁷ and Xₐₐ²⁷ are both SeCys residues, there is a diselenide bond between residue Xₐₐ¹⁷ and residue Xₐₐ²⁷;

[0106] the amino-terminal residue is optionally acetylated, biotinylated, or 4-pentynoylated, or PEGylated; and

[0107] the carboxy-terminal residue is optionally amidated.

[0108] In some of these embodiments, Xₐₐ²² is an acidic amino acid residue, such as a Glu, Asp, phosphoserine, phosphotyrosine, or gamma-carboxyglutamic acid residue.

[0109] In others of these embodiments, Xₐₐ²² is a basic amino acid residue (such as a histidine, lysine, homolysine, ornithine, arginine, N-methyl-arginine, ω-aminoarginine, ω-methyl-arginine, 1-methyl-histidine, 3-methyl-histidine, or homoarginine residue) or an Ala residue; and Xₐₐ³⁰ is selected from Glu, Asp, phosphoserine, phosphotyrosine, and gamma-carboxyglutamic acid residues.

[0110] In particular embodiments, the composition of matter comprises an amino acid sequence selected from SEQ ID NOS: 63, 69, 110-115, 131, 137, 139-147, 149-150, 152-154, 157, 159-172, 174-175, 177-179, 182, 184-246, 273-274, 277, 279, 284-295, 297-356, 392-397, 406-409, 411-422, 426, 435-437, 439-445, 447-452, 455-475, 518, 520, 521, 523, 524, 526, 527, 546-563, 565-566, 568, 573, 574, 576, and 577, as set forth in Table 5; or comprises an amino acid sequence selected from SEQ ID NOS: 63, 69, 112-113, 115, 131, 137, 193-196, 200-203, 207-210, 214-217, 221-224, 228-231, 235-238, 242-246, 277, and 279, as set forth in Table 5, that does not include a non-canonical amino acid.

[0111] The present invention also encompasses a nucleic acid (e.g., DNA or RNA) encoding any of SEQ ID NOS: 63, 69, 112-113, 115, 131, 137, 193-196, 200-203, 207-210, 214-217, 221-224, 228-231, 235-238, 242-246, 277, or 279, as set forth in Table 5, that does not include a non-canonical amino acid; an expression vector comprising the nucleic acid; and a recombinant host cell comprising the expression vector.

[0112] In different embodiments, the present invention is directed to a subset of SEQ ID NO:590, in which the composition of matter comprises an isolated polypeptide comprising the amino acid sequence of the formula: Xₐₐ¹Xₐₐ²Xₐₐ³Xₐₐ⁴Xₐₐ⁵Xₐₐ⁶Xₐₐ⁷Xₐₐ⁸Xₐₐ⁹Xₐₐ¹⁰Xₐₐ¹¹Aspₐₐ¹²Xₐₐ¹³Xₐₐ¹⁴Argₐₐ¹⁵Xₐₐ¹⁶Xₐₐ¹⁷Xₐₐ¹⁸Xₐₐ¹⁹Xₐₐ²⁰Leuₐₐ²¹Xₐₐ²²Xₐₐ²³Xₐₐ²⁴Leuₐₐ²⁵Xₐₐ²⁶Xₐₐ²⁷Xₐₐ²⁸Xₐₐ²⁹Xₐₐ³⁰Xₐₐ³¹Xₐₐ³²Xₐₐ³³Xₐₐ³⁴//SEQ ID NO:517

or a pharmaceutically acceptable salt thereof,
wherein:

[0113] Xₐₐ¹ is absent; or Xₐₐ¹ is any amino acid residue;

[0114] Xₐₐ² is any hydrophobic amino acid residue, or a Pra, Aha, Abu, Nva, Nle, Sar, hLeu, hPhe, D-Leu, D-Phe, D-Ala, bA1a, AllylG, CyA, or Atz residue;

[0115] Xₐₐ³ is any amino acid residue;

[0116] Xₐₐ⁴ is Cys, if Xₐₐ¹⁸ is Cys; or Xₐₐ⁴ is SeCys, if Xₐₐ¹⁸ is SeCys;

[0117] Xₐₐ⁵ is any neutral hydrophilic or basic amino acid residue;

[0118] Xₐₐ⁶ is any basic amino acid residue;

[0119] Xₐₐ⁷ is a Trp, 5-bromoTrp, 6-bromoTrp, 5-chloroTrp, 6-chloroTrp, 1-Nal, 2-Nal, or thioTrp residue;

[0120] Xₐₐ⁸ is a Leu or Nle residue;

[0121] Xₐₐ⁹ is a Trp, 5-bromoTrp, 6-bromoTrp, 5-chloroTrp, 6-chloroTrp, 1-Nal, 2-Nal, or thioTrp residue;

[0122] Xₐₐ¹⁰ is a basic or neutral hydrophilic amino acid residue, or an Ala residue;

[0123] Xₐₐ¹¹ is Cys if Xₐₐ²³ is Cys; or Xₐₐ¹¹ is SeCys if Xₐₐ²³ is SeCys;

[0124] Xₐₐ¹³ is any amino acid residue except a hydrophobic residue;

[0125] Xₐₐ¹⁴ is a basic residue or an Ala residue;

[0126] Xₐₐ¹⁶ is any amino acid residue;

[0127] Xₐₐ¹⁷ is a Cys if Xₐₐ²⁷ is Cys; or Xₐₐ¹⁷ is a SeCys if Xₐₐ²⁷ is SeCys;

[0128] Xₐₐ¹⁸ is a Cys or SeCys;

[0129] Xₐₐ¹⁹ is any amino acid residue;

[0130] Xₐₐ²⁰ is a Gly or Ala residue;

[0131] Xₐₐ²² is a basic amino acid residue, or Ala residue;

[0132] Xₐₐ²³ is a Cys or SeCys residue;

[0133] Xₐₐ²⁴ is a basic amino acid or Ala residue;

[0134] Xₐₐ²⁶ is a Trp, 5-bromoTrp, 6-bromoTrp, 5-chloroTrp, 6-chloroTrp, 1-Nal, 2-Nal, or thioTrp residue;

[0135] Xₐₐ²⁷ is a Cys or SeCys residue;

[0136] Xₐₐ²⁸ is a basic amino acid residue;

[0137] Xₐₐ²⁹ is a basic amino acid residue;

[0138] Xₐₐ³⁰ is an Ile, Trp, Tyr, 5-bromoTrp, 6-bromoTrp, 5-chloroTrp, 6-chloroTrp, 1-Nal, 2-Nal, thioTrp, 1-Nal, or 2-Nal residue;

[0139] Xₐₐ³¹ is an Ile, Trp, Tyr, 5-bromoTrp, 6-bromoTrp, 5-chloroTrp, 6-chloroTrp, 1-Nal, 2-Nal, thioTrp, 1-Nal, or 2-Nal residue;

[0140] each of Xₐₐ³², Xₐₐ³³, and Xₐₐ³⁴ is independently absent or is independently a hydrophobic amino acid residue;

[0141] and wherein:

[0142] if Xₐₐ⁴ and Xₐₐ¹⁸ are both Cys residues, there is a disulfide bond between residue Xₐₐ⁴ and residue Xₐₐ¹⁸; or if Xₐₐ⁴ and Xₐₐ¹⁸ are both SeCys residues, there is a diselenide bond between residue Xₐₐ⁴ and residue Xₐₐ¹⁸;

[0143] if Xₐₐ¹¹ and Xₐₐ²³ are both Cys residues, there is a disulfide bond between residue Xₐₐ¹¹ and residue Xₐₐ²³; or if Xₐₐ¹¹ and Xₐₐ²³ are both SeCys residues, there is a diselenide bond between residue Xₐₐ¹¹ and residue Xₐₐ²³;

[0144] if Xₐₐ¹⁷ and Xₐₐ²⁷ are both Cys residues, there is a disulfide bond between residue Xₐₐ¹⁷ and residue Xₐₐ²⁷; or if Xₐₐ¹⁷ and Xₐₐ²⁷ are both SeCys residues, there is a diselenide bond between residue Xₐₐ¹⁷ and residue Xₐₐ²⁷;

[0145] the amino-terminal residue is optionally acetylated, biotinylated, or 4-pentynoylated, or PEGylated; and

[0146] the carboxy-terminal residue is optionally amidated.

[0147] In particular embodiments, the composition of matter comprises an amino acid sequence selected from SEQ ID NOS: 247, 296, 358, 360, 361, 363-370, 372-391, 398-405, 410, 423-425, 427, 431-434, 438, 446, 453, 454, 571, 579-587, and 588, as set forth in Table 5.

[0148] The compositions of the invention provide an effective method of treating, or preventing, pain, for example acute, persistent, or chronic pain. Selectivity against off-target sodium channels, particularly those governing cardiac excitability (Nav1.5) and skeletal muscle excitability (Na_{V}1.4), is cardinal for any systemically delivered therapeutic. This selectivity is a particularly high hurdle for a dual inhibitor. Compositions of the present invention provide such selectivity against Nav1.5 and Nav 1.4.

[0149] Consequently, the present invention is also directed to a pharmaceutical composition or a medicament containing the inventive composition of matter, and a pharmaceutically acceptable carrier.

[0150] The JzTx-V peptide analogs of the present invention are also useful as research tools, e.g., as probes for correctly folded, functional Nav1.7 in the plasma membrane of live cells. As and its congeners inhibit Nav1.7 they clearly bind to the channel molecule with high potency and selectivity. Labeling with fluorescent or other tracer groups at the non-active sites of the JzTx-V peptide analogs as defined by NMR (see, e.g., Example 6 herein) and by residue substitution can provide research tools suitable for, but not limited to, localizing sodium channels, sorting cells that express sodium channels, and screening or panning for peptides that bind to Nav1.7.

### BRIEF DESCRIPTION OF THE DRAWINGS

[0151] FIG. 1 shows the reversed phase (RP) HPLC chromatogram of UV absorbance at 214 nm from the LC-MS analysis of synthetic JzTx-V(1-29) (SEQ ID NO:2).

[0152] FIG. 2 shows the total ion count (TIC) chromatogram of the ESI-MS detector from the LC-MS analysis of synthetic JzTx-V(1-29) (SEQ ID NO:2).

[0153] FIG. 3 shows the ESI-MS analysis of the peak with the retention time (rₜ) of 4.95 minutes in FIG. 2. The peaks with m/z ratios of 1803.3, 1202.4, and 902.2 represent the [M+2H]²⁺, [M+3H]³⁺ and [M+4H]⁴⁺ charge states, respectively, of JzTx-V(1-29), which has an average molecular weight of 3605.36 Da.

[0154] FIG. 4 shows the effect of JzTx-V(1-29) (SEQ ID NO:2) on hNav1.8 channels in inducible CHO cell. Cell was held at −85 mV and peak inward Nav currents were measured at 0 mV. “0.5 μM TTX Control” trace shows Nav current before JzTx-V(1-29) (SEQ ID NO:2), “0.5 μM TTX+1.0 μM Seq ID No. 2” trace shows Nav current after JzTx-V(1-29) (SEQ ID NO:2) addition, and “0.5 μM TTX+1.0 μM TTX-R inhibitor” shows Nav current after addition of a blocker of Nav1.8 channels that are resistant to block by TTX. Note that 0.5 μM JzTx-V(1-29) (SEQ ID NO:2) blocked approximately 50% of TTX-resistant hNav1.8 current. All solutions contained 0.5 μM TTX to block endogenous TTX-sensitive Nav currents.

[0155] FIG. 5 shows the time course of increasing concentrations of JzTx-V(1-29) (SEQ ID NO:2) against hNav1.8 channels in inducible CHO cell. Peak inward Nav currents were measured at 0 mV every 10 seconds in the presence of increasing concentrations of JzTx-V(1-29) (SEQ ID NO:2); cell was held at either −120 mV (squares) or −85 mV (circles). “Ctrl” indicates Nav current in the absence of JzTx-V(1-29) (SEQ ID NO:2), “0.5 μM TTX” indicates Nav current in the presence of 0.5 μM TTX to block endogenous TTX-sensitive channels, “1.0 μM TTX-R inhibitor” indicates Nav current in the presence of a blocker of Nav1.8 channels that are resistant to block by TTX, and “Wash” indicates Nav current following removal of JzTx-V(1-29) (SEQ ID NO:2) and TTX. 0.5 μM TTX was present in all solutions when cells were held at −85 mV.

[0156] FIG. 6 shows the dose-response curves of JzTx-V(1-29) (SEQ ID NO:2) against hNav1.8 channels in two separate inducible CHO cells. Peak inward Nav currents were measured at 0 mV in the presence of increasing concentrations of JzTx-V(1-29) (SEQ ID NO:2).

[0157] FIG. 7 shows the effect of JzTx-V(1-29) (SEQ ID NO:2) on hNav1.7 channels in HEK293 cell. Cell was held at −82 mV and peak inward Nav currents were measured at 0 mV. “Control” trace shows Nav1.7 current before JzTx-V(1-29) (SEQ ID NO:2), “1 μM Seq ID No. 2” trace shows Nav current after JzTx-V(1-29) (SEQ ID NO:2) addition.

[0158] FIG. 8 shows the time course of increasing concentrations of JzTx-V(1-29) (SEQ ID NO:2) against hNav1.7 channels in HEK293 cell. Peak inward Nav currents were measured at 0 mV every 10 seconds in the presence of increasing concentrations of JzTx-V(1-29) (SEQ ID NO:2); cell was held at either −140 mV (squares), a voltage where Nav1.7 channels are completely non-inactivated, or −82 mV (circles), a voltage that yields approximately 20% inactivation. “Ctrl” indicates Nav1.7 current in the absence of JzTx-V(1-29) (SEQ ID NO:2) and “Wash” indicates Nav1.7 current following removal of JzTx-V(1-29) (SEQ ID NO:2). Note that 1 μM JzTx-V(1-29) (SEQ ID NO:2) blocked all Nav1.7 current.

[0159] FIG. 9 shows the dose-response curves of JzTx-V(1-29) (SEQ ID NO:2) against hNav1.7 channels in two separate HEK293 cells. Peak inward Nav1.7 currents were measured at 0 mV in the presence of increasing concentrations of JzTx-V(1-29) (SEQ ID NO:2); cells were held at a voltage that yielded 20% inactivation.

[0160] FIG. 10 shows the effect of JzTx-V(1-29) (SEQ ID NO:2) on hNav1.5 channels in HEK293 cell. Cell was held at −85 mV and peak inward Nav currents were measured at 0 mV. “Control” trace shows Nav1.5 current before JzTx-V(1-29) (SEQ ID NO:2), “3 μM Seq ID No. 2” trace shows Nav current after JzTx-V(1-29) (SEQ ID NO:2) addition. Note that 3 μM JzTx-V(1-29) (SEQ ID NO:2) blocked most Nav1.5 current.

[0161] FIG. 11 shows the time course of increasing concentrations of JzTx-V(1-29) (SEQ ID NO:2) against hNav1.5 channels in HEK293 cell. Peak inward Nav currents were measured at 0 mV every 10 seconds in the presence of increasing concentrations of JzTx-V(1-29) (SEQ ID NO:2); cell was held at either −140 mV (squares), a voltage where Nav1.5 channels are completely non-inactivated, or −85 mV (circles), a voltage that yields approximately 20% inactivation. “Ctrl” indicates Nav1.5 current in the absence of JzTx-V(1-29) (SEQ ID NO:2) and “Wash” indicates Nav1.5 current following removal of JzTx-V(1-29) (SEQ ID NO:2).

[0162] FIG. 12 shows the dose-response curves of JzTx-V(1-29) (SEQ ID NO:2) against hNav1.5 channels in two separate HEK293 cells. Peak inward Nav1.5 currents were measured at 0 mV in the presence of increasing concentrations of JzTx-V(1-29) (SEQ ID NO:2); cells were held at a voltage that yielded 20% inactivation.

[0163] FIG. 13 shows the effect of JzTx-V(1-29) (SEQ ID NO:2) on hNav1.4 channels in HEK293 cell. Cell was held at −83 mV and peak inward Nav currents were measured at 0 mV. “Control” trace shows Nav1.4 current before JzTx-V(1-29) (SEQ ID NO:2), “100 nM Seq ID No. 2” trace shows Nav1.4 current after JzTx-V(1-29) (SEQ ID NO:2) addition. Note that 100 nM JzTx-V(1-29) (SEQ ID NO:2) completely blocked Nav1.4 current.

[0164] FIG. 14 shows the time course of increasing concentrations of JzTx-V(1-29) (SEQ ID NO:2) against hNav1.4 channels in HEK293 cell. Peak inward Nav currents were measured at 0 mV every 10 seconds in the presence of increasing concentrations of JzTx-V(1-29) (SEQ ID NO:2); cell was held at either −140 mV (squares), a voltage where Nav1.4 channels are completely non-inactivated, or −88 mV (circles), a voltage that yields approximately 20% inactivation. “Ctrl” indicates Nav1.4 current in the absence of JzTx-V(1-29) (SEQ ID NO:2) and “Wash” indicates Nav1.4 current following removal of JzTx-V(1-29) (SEQ ID NO:2).

[0165] FIG. 15 shows the dose-response curves of JzTx-V(1-29) (SEQ ID NO:2) against hNav1.4 channels in two separate HEK293 cells. Peak inward Nav1.4 currents were measured at 0 mV in the presence of increasing concentrations of JzTx-V(1-29) (SEQ ID NO:2); cells were held at a voltage that yielded 20% inactivation.

[0166] FIG. 16 shows the effect of JzTx-V(1-29) (SEQ ID NO:2) on hNav1.3 channels in CHO cell. Cell was held at −80 mV and peak inward Nav currents were measured at 0 mV. “Control” trace shows Nav1.3 current before JzTx-V(1-29) (SEQ ID NO:2), “300 nM Seq ID No. 2” trace shows Nav1.3 current after JzTx-V(1-29) (SEQ ID NO:2) addition. Note that 300 nM JzTx-V(1-29) (SEQ ID NO:2) completely blocked Nav1.3 current.

[0167] FIG. 17 shows the time course of increasing concentrations of JzTx-V(1-29) (SEQ ID NO:2) against hNav1.3 channels in CHO cell. Peak inward Nav currents were measured at 0 mV every 10 seconds in the presence of increasing concentrations of JzTx-V(1-29) (SEQ ID NO:2); cell was held at either −140 mV (squares), a voltage where Nav1.3 channels are completely non-inactivated, or −80 mV (circles), a voltage that yields approximately 20% inactivation. “Ctrl” indicates Nav1.3 current in the absence of JzTx-V(1-29) (SEQ ID NO:2) and “Wash” indicates Nav1.3 current following removal of JzTx-V(1-29) (SEQ ID NO:2).

[0168] FIG. 18 shows the dose-response curves of JzTx-V(1-29) (SEQ ID NO:2) against hNav1.3 channels in two separate CHO cells. Peak inward Nav1.3 currents were measured at 0 mV in the presence of increasing concentrations of JzTx-V(1-29) (SEQ ID NO:2); cells were held at a voltage that yielded 20% inactivation.

[0169] FIG. 19 shows the effect of [Glu20,Trp29]JzTx-V(1-29) (SEQ ID NO:112) on hNav1.7 channels in HEK293 cell. Cell was held at −80 mV and peak inward Nav currents were measured at −10 mV. “Control” trace shows Nav1.7 current before [Glu20,Trp29]JzTx-V(1-29) (SEQ ID NO:112) addition, and “100.0 nM SEQ ID No. 112” trace shows Nav current after [Glu20,Trp29]JzTx-V(1-29) (SEQ ID NO:112) addition. Note that 100 nM [Glu20,Trp29]JzTx-V(1-29) (SEQ ID NO:112) only blocked approximately 80% of Nav1.7 current.

[0170] FIG. 20 shows the time course of increasing concentrations of [Glu20,Trp29]JzTx-V(1-29) (SEQ ID NO:112) against hNav1.7 channel in HEK293 cell. Peak inward Nav currents were measured at −10 mV every 10 seconds in the presence of increasing concentrations of [Glu20,Trp29]JzTx-V(1-29) (SEQ ID NO:112); cell was held at either −120 mV (squares), a voltage where Nav1.7 channels are completely non-inactivated, or −80 mV (circles), a voltage that yields approximately 20% inactivation. “Ctrl” indicates Nav1.7 current in the absence of [Glu20,Trp29]JzTx-V(1-29) (SEQ ID NO:112) and “Wash” indicates Nav1.7 current following removal of [Glu20,Trp29]JzTx-V(1-29) (SEQ ID NO:112). Note that 100 nM [Glu20,Trp29]JzTx-V(1-29) (SEQ ID NO:112) did not completely block Nav1.7 current.

[0171] FIG. 21 shows the dose-response curves of [Glu20,Trp29]JzTx-V(1-29) (SEQ ID NO:112) against hNav1.7 channels in two separate HEK293 cells. Peak inward Nav1.7 currents were measured at −10 mV in the presence of increasing concentrations of [Glu20,Trp29]JzTx-V(1-29) (SEQ ID NO:112); cells were held at a voltage that yielded around 20% inactivation. IC₅₀ values are estimated since complete block of Nav1.7 was not observed at the highest concentration of [Glu20,Trp29]JzTx-V(1-29) (SEQ ID NO:112) tested.

[0172] FIG. 22 shows the effect of Pra-[Nle6]JzTx-V(1-29) (SEQ ID NO:425) on hNav1.7 channels in HEK293 cell. Cell was held at −140 mV and peak inward Nav currents were measured at −10 mV. “Control” trace shows Nav1.7 current before Pra-[Nle6]JzTx-V(1-29) (SEQ ID NO:425) and ‘100 pM Seq ID No. 425’ trace shows Nav current after Pra-[Nle6]JzTx-V(1-29) (SEQ ID NO:425) addition. Note that 100 pM Pra-[Nle6]JzTx-V(1-29) (SEQ ID NO:425) fully blocked Nav1.7 current.

[0173] FIG. 23 shows the time course of increasing concentrations of Pra-[Nle6]JzTx-V(1-29) (SEQ ID NO:425) against hNav1.7 channel in HEK293 cell. Peak inward Nav currents were measured at −10 mV every 10 seconds in the presence of increasing concentrations of Pra-[Nle6]JzTx-V(1-29) (SEQ ID NO:425); cell was held at −140 mV, a voltage where Nav1.7 channels were fully non-inactivated. “Ctrl” indicates Nav1.7 current in the absence of Pra-[Nle6]JzTx-V(1-29) (SEQ ID NO:425) and “Wash” indicates Nav1.7 current following removal of Pra-[Nle6]JzTx-V(1-29) (SEQ ID NO:425).

[0174] FIG. 24 shows the dose-response curves of Pra-[Nle6]JzTx-V(1-29) (SEQ ID NO:425) against hNav1.7 channels in two separate HEK293 cells. Peak inward Nav1.7 currents were measured at −10 mV in the presence of increasing concentrations of Pra-[Nle6]JzTx-V(1-29) (SEQ ID NO:425); cells were held at −140 mV, a voltage where Nav1.7 channels were fully non-inactivated.

[0175] FIG. 25 shows the effect of Pra-[Nle6]JzTx-V(1-29) (SEQ ID NO:425) on hNav1.7 channels in HEK293 cell. Cell was held at −77 mV (partially inactivated state) and peak inward Nav currents were measured at −10 mV. “Control” trace shows Nav1.7 current before Pra-[Nle6]JzTx-V(1-29) (SEQ ID NO:425) and “100 pM Seq ID No. 425” trace shows Nav current after Pra-[Nle6]JzTx-V(1-29) (SEQ ID NO:425) addition. Note that 100 pM Pra-[Nle6]JzTx-V(1-29) (SEQ ID NO:425) fully blocked Nav1.7 current.

[0176] FIG. 26 shows the time course of increasing concentrations of Pra-[Nle6]JzTx-V(1-29) (SEQ ID NO:425) against hNav1.7 channel in HEK293 cell. Peak inward Nav currents were measured at −10 mV every 10 seconds in the presence of increasing concentrations of Pra-[Nle6]JzTx-V(1-29) (SEQ ID NO:425); cell was held at either −140 mV (squares), a voltage where Nav1.7 channels are completely non-inactivated, or −77 mV (circles), a voltage that yields approximately 20% inactivation. “Ctrl” indicates Nav1.7 current in the absence of Pra-[Nle6]JzTx-V(1-29) (SEQ ID NO:425) and “Wash” indicates Nav1.7 current following removal of Pra-[Nle6]JzTx-V(1-29) (SEQ ID NO:425).

[0177] FIG. 27 shows the dose-response curves of Pra-[Nle6]JzTx-V(1-29) (SEQ ID NO:425) against hNav1.7 channels in two separate HEK293 cells. Peak inward Nav1.7 currents were measured at −10 mV in the presence of increasing concentrations of Pra-[Nle6]JzTx-V(1-29) (SEQ ID NO:425); cells were held at a voltage that yielded around 20% inactivation.

[0178] FIG. 28 shows the effect of JzTx-V(1-29) (SEQ ID NO:2) on TTX-sensitive Nav channels in mouse DRG neuron. Cell was held at −100 mV and peak inward Nav currents were measured at 0 mV. “Control” trace shows Nav current before JzTx-V(1-29) (SEQ ID NO:2), “1 μM Seq ID No. 2” trace shows Nav current after JzTx-V(1-29) (SEQ ID NO:2) addition, and “0.5 μM TTX” trace shows Nav current after TTX. Note that 1 μM JzTx-V(1-29) (SEQ ID NO:2) and 0.5 μM TTX both completely blocked TTX-sensitive Nav current.

[0179] FIG. 29 shows the time course of increasing concentrations of JzTx-V(1-29) (SEQ ID NO:2) against TTX-sensitive Nav channels in mouse DRG neuron. Peak inward Nav currents were measured at 0 mV every 10 seconds in the presence of increasing concentrations of JzTx-V(1-29) (SEQ ID NO:2); cell was held at either −140 mV (squares), a voltage where Nav channels are completely non-inactivated, or −100 mV (circles), a voltage that yields approximately 25% inactivation. “Ctrl” indicates Nav current in the absence of JzTx-V(1-29) (SEQ ID NO:2), “TTX” indicates Nav current in the presence of 0.5 μM TTX, and “Wash” indicates Nav current following removal of JzTx-V(1-29) (SEQ ID NO:2) and TTX. Note that JzTx-V(1-29) (SEQ ID NO:2) blocked nearly all TTX-sensitive Nav current.

[0180] FIG. 30 shows the dose-response curves of JzTx-V(1-29) (SEQ ID NO:2) against TTX-sensitive Nav channels in two separate mouse DRG neurons. Peak inward Nav currents were measured at 0 mV in the presence of increasing concentrations of JzTx-V(1-29) (SEQ ID NO:2); cells were held at a voltage that yielded 20-25% inactivation.

[0181] FIG. 31 shows the effect of JzTx-V(1-29) (SEQ ID NO:2) on TTX-resistant Nav channels in mouse DRG neuron. Cell was held at −120 mV and peak inward Nav currents were measured at 0 mV. “Control” trace shows Nav current before JzTx-V(1-29) (SEQ ID NO:2), “0.5 μM TTX” trace shows Nav current after TTX, and “0.5 μM TTX+1.0 μM Seq ID No. 2” trace shows Nav current after TTX and JzTx-V(1-29) (SEQ ID NO:2) addition. Note that JzTx-V(1-29) (SEQ ID NO:2) had nominal effect on peak TTX-resistant current but prolonged the level of TTX-resistant current at 40 msec. IC₅₀ was not measurable.

[0182] FIG. 32 shows the time course of 1 μM JzTx-V(1-29) (SEQ ID NO:2) against TTX-resistant Nav channels in mouse DRG neuron (fully non-inactivated state). Peak (squares) and sustained inward Nav currents at 40 msec (circles) were measured at 0 mV from a holding potential of −120 mV every 10 seconds. “Control” indicates Nav current in the absence of JzTx-V(1-29) (SEQ ID NO:2); “TTX” indicates Nav current in the presence of 0.5 μM TTX, “1 μM Seq ID No. 2+0.5 μM TTX” indicates Nav current in the presence of JzTx-V(1-29) (SEQ ID NO:2) and TTX, and “Wash” indicates Nav current following removal of JzTx-V(1-29) (SEQ ID NO:2) and TTX. Note that JzTx-V(1-29) (SEQ ID NO:2) had nominal effect on peak TTX-resistant current but prolonged the level of TTX-resistant current at 40 msec. IC₅₀ was not measurable.

[0183] FIG. 33 shows the effect of [Glu20,Trp29]JzTx-V(1-29) (SEQ ID NO:112) on TTX-sensitive Nav channels in mouse DRG neuron cultured for 10 days. Cell was held at −85 mV and peak inward Nav currents were measured at −10 mV. “Control” trace shows Nav current before [Glu20,Trp29]JzTx-V(1-29) (SEQ ID NO:112), “300 nM Seq ID No. 112” trace shows Nav current after [Glu20,Trp29]JzTx-V(1-29) (SEQ ID NO:112) addition, and “0.5 μM TTX” trace shows Nav current after TTX addition. Note that 300 nM [Glu20,Trp29]JzTx-V(1-29) (SEQ ID NO:112) only blocked around half of TTX-sensitive Nav current.

[0184] FIG. 34 shows the time course of increasing concentrations of [Glu20,Trp29]JzTx-V(1-29) (SEQ ID NO:112) against TTX-sensitive Nav channels in mouse DRG neuron cultured for 10 days. Peak inward Nav currents were measured at −10 mV every 10 seconds in the presence of increasing concentrations of [Glu20,Trp29]JzTx-V(1-29) (SEQ ID NO:112); cell was held at either −120 mV (squares), a voltage where Nav channels are completely non-inactivated, or −85 mV (circles), a voltage that yields approximately 20% inactivation. “Ctrl” indicates Nav current in the absence of [Glu20,Trp29]JzTx-V(1-29) (SEQ ID NO:112), “0.5 μM TTX” indicates Nav current in the presence of 0.5 μM TTX, and “Wash” indicates Nav current following removal of [Glu20,Trp29]JzTx-V(1-29) (SEQ ID NO:112) and TTX.

[0185] FIG. 35 shows the dose-response curves of [Glu20,Trp29]JzTx-V(1-29) (SEQ ID NO:112) against TTX-sensitive Nav channels in two separate mouse DRG neurons cultured for 10 days. Peak inward Nav currents were measured at −10 mV in the presence of increasing concentrations of [Glu20,Trp29]JzTx-V(1-29) (SEQ ID NO:112); cells were held at a voltage that yielded 20% inactivation.

[0186] FIG. 36 shows the effect of [Glu20,Trp29]JzTx-V(1-29) (SEQ ID NO:112) on TTX-sensitive Nav channels in acutely isolated mouse DRG neuron. Cell was held at −70 mV and peak inward Nav currents were measured at −10 mV. “Control” trace shows Nav current before [Glu20,Trp29]JzTx-V(1-29) (SEQ ID NO:112), “1 μM Seq ID No. 112” trace shows Nav current after [Glu20,Trp29]JzTx-V(1-29) (SEQ ID NO:112) addition, and “0.5 μM TTX” trace shows Nav current after TTX addition. Note that 1 μM [Glu20,Trp29]JzTx-V(1-29) (SEQ ID NO:112) only partially blocked TTX-sensitive Nav current. Current that remained following 0.5 μM TTX is TTX-resistant current.

[0187] FIG. 37 shows the time course of increasing concentrations of [Glu20,Trp29]JzTx-V(1-29) (SEQ ID NO:112) against TTX-sensitive Nav channels in acutely isolated mouse DRG neuron. Peak inward Nav currents were measured at −10 mV every 10 seconds in the presence of increasing concentrations of [Glu20,Trp29]JzTx-V(1-29) (SEQ ID NO:112); cell was held at either −120 mV (squares), a voltage where Nav channels are completely non-inactivated, or −70 mV (circles), a voltage that yields approximately 20% inactivation. “Ctrl” indicates Nav current in the absence of [Glu20,Trp29]JzTx-V(1-29) (SEQ ID NO:112), “0.5 μM TTX” indicates Nav current in the presence of 0.5 μM TTX, and “Wash” indicates Nav current following removal of [Glu20,Trp29]JzTx-V(1-29) (SEQ ID NO:112) and TTX.

[0188] FIG. 38 shows the dose-response curves of [Glu20,Trp29]JzTx-V(1-29) (SEQ ID NO:112) against TTX-sensitive Nav channels in acutely isolated mouse DRG neuron. Peak inward Nav currents were measured at −10 mV in the presence of increasing concentrations of [Glu20,Trp29]JzTx-V(1-29) (SEQ ID NO:112); cells were held at a voltage that yielded 20% inactivation. TTX-sensitive currents were measured in reference to the current remaining after 0.5 μM TTX, which was taken as the zero point.

[0189] FIG. 39 shows the effect of Pra-[Nle6]JzTx-V(1-29) (SEQ ID NO:425) on TTX-sensitive Nav channels in mouse DRG neuron cultured for 10 days. Cell was held at −75 mV and peak inward Nav currents were measured at −10 mV. “Control” trace shows Nav current before Pra-[Nle6]JzTx-V(1-29) (SEQ ID NO:425), “100 nM Seq ID No. 425” trace shows Nav current after Pra-[Nle6]JzTx-V(1-29) (SEQ ID NO:425) addition, and “0.5 μM TTX” trace shows Nav current after TTX addition. Note that 100 nM Pra-[Nle6]JzTx-V(1-29) (SEQ ID NO:425) blocked most TTX-sensitive Nav current.

[0190] FIG. 40 shows the time course of increasing concentrations of Pra-[Nle6]JzTx-V(1-29) (SEQ ID NO:425) against TTX-sensitive Nav channels in mouse DRG neuron cultured for 10 days. Peak inward Nav currents were measured at −10 mV every 10 seconds in the presence of increasing concentrations of Pra-[Nle6]JzTx-V(1-29) (SEQ ID NO:425); cell was held at either −120 mV (squares), a voltage where Nav channels are completely non-inactivated, or −75 mV (circles), a voltage that yields approximately 20% inactivation. “Ctrl” indicates Nav current in the absence of Pra-[Nle6]JzTx-V(1-29) (SEQ ID NO:425), “0.5 μM TTX” indicates Nav current in the presence of 0.5 μM TTX, and “Wash” indicates Nav current following removal of Pra-[Nle6]JzTx-V(1-29) (SEQ ID NO:425) and TTX.

[0191] FIG. 41 shows the dose-response curves of Pra-[Nle6]JzTx-V(1-29) (SEQ ID NO:425) against TTX-sensitive Nav channels in two separate mouse DRG neurons cultured for 10 days. Peak inward Nav currents were measured at −10 mV in the presence of increasing concentrations of Pra-[Nle6]JzTx-V(1-29) (SEQ ID NO:425); cells were held at a voltage that yielded around 20% inactivation.

[0192] FIG. 42 shows the effect of CyA-[Nle6,Lys(Pra)14,Glu28]JzTx-V(1-29) (SEQ ID NO:392) on TTX-sensitive Nav channels in mouse DRG neuron. Cell was held at −88 mV and peak inward Nav currents were measured at −10 mV. “Control” trace shows Nav current before CyA-[Nle6,Lys(Pra)14,Glu28]JzTx-V(1-29) (SEQ ID NO:392), “300 nM Seq ID No. 392” trace shows Nav current after CyA-[Nle6,Lys(Pra)14,Glu28]JzTx-V(1-29) (SEQ ID NO:392) addition, and “0.5 μM TTX” trace shows Nav current after TTX addition. Note that 300 nM CyA-[Nle6,Lys(Pra)14,Glu28]JzTx-V(1-29) (SEQ ID NO:392) blocked most TTX-sensitive Nav current.

[0193] FIG. 43 shows the time course of increasing concentrations of CyA-[Nle6,Lys(Pra)14,Glu28]JzTx-V(1-29) (SEQ ID NO:392) against TTX-sensitive Nav channels in mouse DRG neuron. Peak inward Nav currents were measured at −10 mV every 10 seconds in the presence of increasing concentrations of CyA-[Nle6,Lys(Pra)14,Glu28]JzTx-V(1-29) (SEQ ID NO:392); cell was held at either −120 mV (squares), a voltage where Nav channels are completely non-inactivated, or −88 mV (circles), a voltage that yields approximately 20% inactivation. “Ctrl” indicates Nav current in the absence of CyA-[Nle6,Lys(Pra)14,Glu28]JzTx-V(1-29) (SEQ ID NO:392), “0.5 μM TTX” indicates Nav current in the presence of 0.5 μM TTX, and “Wash” indicates Nav current following removal of CyA-[Nle6,Lys(Pra)14,Glu28]JzTx-V(1-29) (SEQ ID NO:392) and TTX.

[0194] FIG. 44 shows the dose-response curves of CyA-[Nle6,Lys(Pra)14,Glu28]JzTx-V(1-29) (SEQ ID NO:392) against TTX-sensitive Nav channels in two separate mouse DRG neurons. Peak inward Nav currents were measured at −10 mV in the presence of increasing concentrations of CyA-[Nle6,Lys(Pra)14,Glu28]JzTx-V(1-29) (SEQ ID NO:392); cells were held at a voltage that yielded around 20% inactivation.

[0195] FIG. 45 shows the effect of CyA-[Nle6, Pra17, Glu28]JzTx-V(1-29) (SEQ ID NO:395) on TTX-sensitive Nav channels in mouse DRG neuron. Cell was held at −77 mV and peak inward Nav currents were measured at −10 mV. “Control” trace shows Nav current before CyA-[Nle6,Pra17,Glu28]JzTx-V(1-29) (SEQ ID NO:395), ‘300 nM Seq ID No. 395’ trace shows Nav current after CyA-[Nle6,Pra17,Glu28]JzTx-V(1-29) (SEQ ID NO:395) addition, and “0.5 nM TTX” trace shows Nav current after TTX addition. Note that 300 nM CyA-[Nle6,Pra17,Glu28]JzTx-V(1-29) (SEQ ID NO:395) fully blocked TTX-sensitive Nav current.

[0196] FIG. 46 shows the time course of increasing concentrations of CyA-[Nle6,Pra17,Glu28]JzTx-V(1-29) (SEQ ID NO:395) against TTX-sensitive Nav channels in mouse DRG neuron. Peak inward Nav currents were measured at −10 mV every 10 seconds in the presence of increasing concentrations of CyA-[Nle6,Pra17,Glu28]JzTx-V(1-29) (SEQ ID NO:395); cell was held at either −120 mV (squares), a voltage where Nav channels are completely non-inactivated, or −77 mV (circles), a voltage that yields approximately 20% inactivation. “Ctrl” indicates Nav current in the absence of CyA-[Nle6,Pra17,Glu28]JzTx-V(1-29) (SEQ ID NO:395), “0.5 μM TTX” indicates Nav current in the presence of 0.5 μM TTX, and “Wash” indicates Nav current following removal of CyA-[Nle6,Pra17,Glu28]JzTx-V(1-29) (SEQ ID NO:395) and TTX.

[0197] FIG. 47 shows the dose-response curves of CyA-[Nle6,Pra17,Glu28]JzTx-V(1-29) (SEQ ID NO:395) against TTX-sensitive Nav channels in two separate mouse DRG neurons. Peak inward Nav currents were measured at −10 mV in the presence of increasing concentrations of CyA-[Nle6,Pra17,Glu28]JzTx-V(1-29) (SEQ ID NO:395); cells were held at a voltage that yielded around 20% inactivation.

[0198] FIG. 48 shows an overlay of the 20 lowest energy conformations of the peptide backbone for the NMR solution structure of Pra-[Nle6]JzTx-V(1-29) (SEQ ID NO:425).

[0199] FIG. 49 shows an overlay of the heavy atoms from the 20 lowest energy conformations of the peptide for the NMR solution structure of Pra-[Nle6]JzTx-V(1-29) (SEQ ID NO:425).

[0200] FIG. 50 shows a ribbon representation of the lowest energy conformation of the peptide backbone for the NMR solution structure of Pra-[Nle6]JzTx-V(1-29) (SEQ ID NO:425). The three disulfide bridges are represented as sticks.

[0201] FIG. 51 shows an overlay of the ribbon representations of the 20 lowest energy conformation of the peptide backbone for the NMR solution structure of Pra-[Nle6]JzTx-V(1-29) (SEQ ID NO:425). The three disulfide bridges are represented as sticks.

[0202] FIG. 52 shows a surface representation of the lowest energy conformation of the peptide for the NMR solution structure of Pra-[Nle6]JzTx-V(1-29) (SEQ ID NO:425). The image on the right is the hydrophobic face of the peptide, and the image on the left is the opposite face of the peptide (rotated 180° on the vertical axis).

[0203] FIG. 53 shows the IWQ Nav1.7 IC50 of the single substitution analogs of JzTx-V. Note that substitution of Meth, Trp7, Leu23, Trp24, and Ile29 result in the largest relative losses in potency, indicating that these positions are important for interaction with the Nav1.7 channel.

[0204] FIG. 54 shows the IWQ IC50 for each of the glutamic acid single substitution analogs against Nav1.7, Nav1.5, Nav1.4, and Nav1.3. Note that [Glu20]JzTx-V (SEQ ID NO:63) and [Glu28]JzTx-V (SEQ ID NO:69) had decreased activity relative to Nav1.7.

[0205] FIG. 55 shows the pharmacokinetic time course of plasma concentrations of [Glu20,Trp29]JzTx-V(1-29) (SEQ ID NO:112) following a 1 mg/kg s.c. dose in male CD-1 mice in relation to the hNav1.7 PX IC50.

[0206] FIG. 56 shows the timecourse of the effect of [Glu20,Trp29]JzTx-V(1-29) (SEQ ID NO:112) in the formalin pain model in male CD-1 mice with a 1-hour pre-treatment dose of 0.1, 0.3, or 1.0 mg/kg s.c. The peptide had no effect in the first or acute phase (0-5 minutes post-formalin injection). The peptide had no effect on the time spent lifting and/or licking the affected paw during the second phase (5-40 minutes post-formalin injection, associated with spinal sensitization) compared to vehicle (PBS). The positive control, a 3 mg/kg s.c. dose of morphine was sufficient to significantly reduce pain response in the animals. The terminal plasma exposures (peptide plasma concentrations at 45 min post-formalin injection) for the peptide were 0.0278±0.0105, 0.121±0.0411, and 0.412±0.0858 μM for the 0.1, 0.3, or 1.0 mg/kg doses, respectively. Data Represent Mean±SEM; Outliers Removed (n=12).

[0207] FIG. 57 shows the effect of [Glu20,Trp29]JzTx-V(1-29) (SEQ ID NO:112) in the formalin pain model in male CD-1 mice with a 1-hour pre-treatment dose of 0.1, 0.3, or 1.0 mg/kg s.c. during the first phase (0-5 minutes post formalin injection). Neither the peptide nor the morphine positive control significantly reduced the time spent lifting and/or licking the affected paw during the first phase. It was observed that the 1 mg/kg dose of peptide may have slightly increased the pain response relative to the vehicle (phosphate buffered saline [PBS]). Pharmacological reductions in flinching during this first phase generally reflect nonspecific effects on animal movement, consciousness, or health rather than an actual reduction in pain. Data Represent Mean±SEM; * p<0.05 by ANOVA/DUNNETTS; Outliers Removed (n=12).

[0208] FIG. 58 shows the effect of [Glu20,Trp29]JzTx-V(1-29) (SEQ ID NO:112) in the formalin pain model in male CD-1 mice with a 1-hour pre-treatment dose of 0.1, 0.3, or 1.0 mg/kg s.c. during the second phase (5-40 minutes post formalin injection). The morphine control but not the peptide significantly reduced the time spent lifting and/or licking the affected paw during the second phase. Data Represent Mean±SEM; *** p<0.0001 by ANOVA/DUNNETTS; Outliers Removed (n=12).

[0209] FIG. 59 shows the timecourse of the effect of [Glu20,Trp29]JzTx-V(1-29) (SEQ ID NO:112) in the formalin pain model in male CD-1 mice with a 1-hour pre-treatment dose of 5.0 mg/kg s.c. After a lack of efficacy was observed at peptide doses <1 mg/kg, the formalin pain model was repeated with an increased peptide dose of 5.0 mg/kg s.c. The peptide had no effect in the first or acute phase (0-5 minutes post formalin injection). The peptide had no effect on the time spent lifting and/or licking the affected paw during the second phase (5-40 minutes post formalin injection, associated with spinal sensitization) compared to vehicle (PBS). The positive control, a 3 mg/kg s.c. dose of morphine was sufficient to significantly reduce pain response in the animals. The terminal plasma exposure (peptide plasma concentrations at 45 min post formalin injection) for the peptide was 2.63±0.777 μM. Data Represent Mean±SEM; Outliers Removed (n=12).

[0210] FIG. 60 shows the effect of [Glu20,Trp29]JzTx-V(1-29) (SEQ ID NO:112) in the formalin pain model in male CD-1 mice with a 1-hour pre-treatment dose of 5.0 mg/kg s.c. (n=8) during the first phase (0-5 minutes post formalin injection). Neither the peptide nor the morphine positive control (s.c., 3 mg/kg, 30′ preTx, n=8) significantly reduced the time spent lifting and/or licking the affected paw during the first phase. Data Represent Mean±SEM; *** p<0.05 by ANOVA/DUNNETTS; Outliers Removed (n=12).

[0211] FIG. 61 shows the effect of [Glu20,Trp29]JzTx-V(1-29) (SEQ ID NO:112) in the formalin pain model in male CD-1 mice with a 1-hour pre-treatment dose of 5.0 mg/kg s.c. (n=8) during the second phase (5-40 minutes post formalin injection). The morphine control (s.c., 3 mg/kg, 30′ preTx, n=8) but not the peptide significantly reduced the time spent lifting and/or licking the affected paw during the second phase. Data Represent Mean±SEM; *** p<0.0001 by ANOVA/DUNNETTS; Outliers Removed (n=12).

[0212] FIG. 62 shows the effect of [Glu20,Trp29]JzTx-V(1-29) (SEQ ID NO:112) in the Complete Freund's Adjuvant (CFA) thermal hyperalgesia pain model (24 h postdose) in male CD-1 mice with a dose of 5.0 mg/kg s.c. (n=10). After a lack of efficacy was observed at peptide doses ≦5 mg/kg in the formalin pain model, the peptide was tested in a second pain model. The peptide had no effect on thermal latency compared to vehicle (PBS). The positive control, a 30 mg/kg oral dose of mexilitine was sufficient to significantly reverse thermal hyperalgesia in the animals. The terminal plasma exposure (peptide plasma concentrations at 2 h post-peptide injection) for the peptide was 1.75±0.536 μM. Data Represent Mean±SEM; *** p<0.0001 by ANOVA/DUNNETTS; Outliers Removed (n=12).

[0213] FIG. 63 shows the effects of [Glu20,Trp29]JzTx-V(1-29) (SEQ ID NO:112) at 0.1, 0.3, and 1.0 mg/kg s.c. doses with a 1-hour pre-treatment time on the total basic movement component of locomotor activity in male CD-1 mice. No doses of peptide significantly decreased exploratory behavior in relation to the vehicle control. Terminal exposures (peptide plasma concentrations at 2 h post peptide injection) were 0.0248±0.00668, 0.121±0.0296, and 0.419±0.226 μM for the 0.1, 0.3, and 1.0 mg/kg s.c. doses, respectively.

[0214] FIG. 64 shows the effects of [Glu20,Trp29]JzTx-V(1-29) (SEQ ID NO:112) at 0.1, 0.3, and 1.0 mg/kg s.c. doses with a 1-hour pre-treatment time on the total rearing component of locomotor activity in male CD-1 mice. No doses of peptide significantly decreased exploratory behavior in relation to the vehicle control.

[0215] FIG. 65 shows the effects of [Glu20,Trp29]JzTx-V(1-29) (SEQ ID NO:112) at a 5.0 mg/kg s.c. dose with a 1-hour pre-treatment time on the total basic movement component of locomotor activity in male CD-1 mice. The dose of peptide did not significantly decrease exploratory behavior in relation to the vehicle control. Terminal exposure (peptide plasma concentrations at 2 h post peptide injection) was 4.73±0.584 μM for the 5.0 mg/kg s.c. dose.

[0216] FIG. 66 shows the effects of [Glu20,Trp29]JzTx-V(1-29) (SEQ ID NO:112) at a 5.0 mg/kg s.c. dose with a 1-hour pre-treatment time on the total rearing component of locomotor activity in male CD-1 mice. The dose of peptide may have slightly decreased the rearing behavior in relation to the vehicle control.

[0217] FIG. 67 shows the timecourse of the effect of [Glu20,Trp29]JzTx-V(1-29) (SEQ ID NO:112) in the formalin pain model in male Sprague-Dawley rats with a 1-hour pre-treatment dose of 5.0 mg/kg s.c. (n=8). After a lack of efficacy was observed at peptide doses ≦5 mg/kg in mice, the formalin pain model was repeated at a 5 mg/kg dose in a second species, Sprague-Dawley rats. The peptide had no effect in the first or acute phase (0-5 minutes post formalin injection). The peptide did not decrease and may have actually increased the time spent lifting and/or licking the affected paw during the second phase (5-40 minutes post formalin injection, associated with spinal sensitization) compared to vehicle (PBS). The positive control, a 2 mg/kg s.c. dose of morphine (n=8) was sufficient to significantly reduce pain response in the animals. The terminal plasma exposure (peptide plasma concentrations at 45 min post-formalin injection) for the peptide was 1.18±0.156 μM.

[0218] FIG. 68 shows the effect of [Glu20,Trp29]JzTx-V(1-29) (SEQ ID NO:112) in the formalin pain model in male Sprague-Dawley rats with a 1-hour pre-treatment dose of 5.0 mg/kg s.c. (n=8) during the second phase (5-40 minutes post formalin injection). The morphine control (s.c., 2 mg/kg, 30′ preTx, n=8), but not the peptide, significantly reduced the time spent lifting and/or licking the affected paw during the second phase. The peptide may have actually increased the pain response in the second phase of the formalin study. Data Represent Mean±SEM; *** p<0.0001 by ANOVA/DUNNETTS.

[0219] FIG. 69 shows the effects of [Glu20,Trp29]JzTx-V(1-29) (SEQ ID NO:112) at a 5.0 mg/kg s.c. dose with a 1-hour pre-treatment time on the total basic movement component of locomotor activity (tested in light-off condition) in male Sprague-Dawley rats (9 weeks of age). The dose of peptide did not significantly decrease exploratory behavior in relation to the vehicle control. Terminal exposure (peptide plasma concentrations at 2 h post peptide injection) was 0.994±0.184 μM for the 5.0 mg/kg s.c. dose. Data Represent Mean±SEM, n=8.

[0220] FIG. 70 shows the effects of [Glu20,Trp29]JzTx-V(1-29)(SEQ ID NO:112) at a 5.0 mg/kg s.c. dose with a 1-hour pre-treatment time on the total rearing component of locomotor activity (tested in light-off condition) in male Sprague-Dawley rats (9 weeks of age). The dose of peptide did not significantly decrease exploratory behavior in relation to the vehicle control. Data Represent Mean±SEM, n=8.

[0221] FIG. 71 shows representative block of Nav1.7 current with administration of 300 nM concentration of monomeric peptide GpTx-1 (SEQ ID NO:532 by manual electrophysiology (Nav1.7 whole cell patch clamp [WCPC] IC₅₀=0.003 μM).

[0222] FIG. 72 shows a representative time course of block of Nav1.7 current by addition of 10 and 300 nM concentrations of monomeric peptide GpTx-1 (SEQ ID NO:532 by manual electrophysiology (WCPC). Note the washout of peptide and recovery of current over time.

[0223] FIG. 73 shows representative block of Nav1.7 current with administration of 300 nM concentration of dimeric peptide Homodimeric Conjugate No. 3 by manual electrophysiology (Nav1.7 WCPC IC₅₀=0.00058 μM).

[0224] FIG. 74 shows a representative time course of block of Nav1.7 current by addition of 300 nM concentration of dimeric peptide Homodimeric Conjugate No. 3 by manual electrophysiology (WCPC). There was no washout of peptide and no recovery of current even after 45 minutes.

[0225] FIG. 75A-B shows the chemical structure of peptide dimer Homodimeric Conjugate No. 3.

[0226] FIG. 76A-B shows a schematic representation of a copper-catalyzed 1,3-dipolar cycloaddition reaction between an azide-containing linker and an alkyne-containing peptide (FIG. 76A) to form a triazole linkage (FIG. 76B).

[0227] FIG. 77 shows the structure of a divalent, bifunctional linker design of the present invention.

[0228] FIG. 78A-B shows structures of a divalent, bifunctional linker designs of the present invention.

[0229] FIG. 79A-B shows a schematic conjugation of a peptidyl-linker with bromoacetamide to an engineered cysteine within a carrier protein, e.g., an immunoglobulin (IgG) protein.

[0230] FIG. 80A-B shows a reaction scheme for preparation of multivalent linkers.

[0231] FIG. 81A-C shows chemical structures of JzTx-V peptide analog SEQ ID NO:272 (FIG. 81A-1, upper row: i.e., R₁=H), plus a peptide linker sequence (SEQ ID NO:427; FIG. 81A-2, left), Homodimeric Conjugate No. 1 (FIG. 81A-2, middle), and Homodimeric Conjugate No. 2 (FIG. 81A-2, right), and schematic structures of Immunoglobulin Peptide Conjugate 1 (FIGS. 81B-C). Within the scope of the invention, any other JzTx-V peptide analog sequence disclosed herein can be used in a conjugate instead of the illustrated SEQ ID NO:272.

[0232] FIG. 82 shows the structure of an exemplary polyazole. (See, also, Sharma, S. K. et al., Org. Chem. 66, 1030-1034 (2001)).

[0233] FIG. 83 shows examples of peptidyl linkers. (See, also, Chen, X. et al. Adv. Drug Deliv. Rev. 2012 doi: 10.1016/j.addr.2012.09.039.)

[0234] FIG. 84A-E shows chemical structures of exemplary peptidyl linkers (FIG. 84A-D), including helical and beta-hairpin scaffolds(FIG. 84E; KKYTYEINGKKITVEI//(SEQ ID NO:1745) and CHWEGNKLVC//(SEQ ID NO:1746).

[0235] FIG. 85 shows a schematic representation of peptide sequences/structures of beta-hairpin linkers KKYTYEINGKKITVEI//(SEQ ID NO:1745) and CHWEGNKLVC//(SEQ ID NO:1746).

[0236] FIG. 86A-B shows exemplary generic (FIG. 86A) and representative (FIG. 86B) chemical structures of polyheterocyclic linkers for use in large-molecule-small-molecule conjugations.

[0237] FIG. 87A-B shows exemplary generic (FIG. 87A) and representative (FIG. 87B) chemical structures of multivalent linkers for use in conjugations.

[0238] FIG. 88 shows further examples of multivalent linkers.

[0239] FIG. 89A-B shows exemplary generic (FIG. 89A) and representative (FIG. 89B) chemical structures of further examples of multivalent linkers for use in conjugations.

[0240] FIG. 90 shows further examples of chemical structures of multivalent linkers.

[0241] FIG. 91 shows monovalent linkers of different lengths with mixed alkyl and PEG composition and PEG-only linkers of three different lengths.

[0242] FIG. 92A-B shows the results from the purification of the site specific conjugation reaction mixture of peptide-linker construct (Homodimeric Peptide No. 1) with anti-DNP mAb (E273C) hIgG1 (comprising immunoglobulin monomers SEQ ID NO:542; SEQ ID NO:543; SEQ ID NO:542; SEQ ID NO:543; see, Example 9 and Table 21). FIG. 92A shows the cation exchange chromatogram of UV absorbance at 280 nm of the conjugation reaction using a 5-mL HiTrap SP-HP column. FIG. 92B shows a reducing SDS-PAGE gel of the peaks from the cation exchange chromatogram. Peak 1 shows the heavy chain (HC) and light chain (LC) of the non-reacted antibody. Peak 3 shows approximately 50% of the HC shifted (HC*) indicating a monovalent antibody-JzTx-V peptide dimer conjugate. Peak 4 shows nearly 100% HC shifted indicating bivalent antibody—JzTx-V peptide dimer conjugate (Immunoglobulin Peptide Conjugate 1).

[0243] FIG. 93 shows a reducing SDS-PAGE gel of Immunoglobulin Peptide Conjugate 1 from the site specific conjugation reaction of peptide-linker construct (Homodimeric Peptide No. 1, see Example 5) with anti-DNP mAb (E273C) hIgG1 (comprising immunoglobulin monomers SEQ ID NO:542; SEQ ID NO:543; SEQ ID NO:542; SEQ ID NO:543, see Example 9) following purification on the SP-column.

[0244] FIG. 94A-N shows schematic structures of some embodiments of a composition of the invention that include one or more units of a pharmacologically active toxin, e.g., toxin (e.g., JzTx-V) peptide analog (squiggle) fused, via an optional peptidyl linker moiety such as but not limited to L5 or L10 described herein, with one or more domains of an immunoglobulin. These schematics show a more typical IgG1, although they are intended to apply as well to IgG2s, which will have 4 disulfide bonds in the hinge and a different arrangement of the disulfide bond linking the heavy and light chain, and IgG3s and IgG4s. FIG. 94A represents a monovalent heterodimeric Fc-toxin peptide analog fusion or conjugate with the toxin peptide analog fused or conjugated to the C-terminal end of one of the immunoglobulin Fc domain monomers. FIG. 94B represents a bivalent homodimeric Fc-toxin peptide analog fusion or conjugate, with toxin peptide analogs fused to the C-terminal ends of both of the immunoglobulin Fc domain monomers. FIG. 94C represents a monovalent heterodimeric toxin peptide analog-Fc fusion or conjugate with the toxin peptide analog fused or chemically conjugated to the N-terminal end of one of the immunoglobulin Fc domain monomers. FIG. 94D represents a bivalent homodimeric toxin peptide analog-Fc fusion or conjugate, with toxin peptide analogs fused to the N-terminal ends of both of the immunoglobulin Fc domain monomers. FIG. 94E represents a monovalent heterotrimeric Fc-toxin peptide analog/Ab comprising an immunoglobulin heavy chain (HC)+immunoglobulin light chain (LC)+an immunoglobulin Fc monomer with a toxin peptide analog fused to its C-terminal end. FIG. 94F represents a monovalent heterotetrameric (HT) antibody HC-toxin peptide analog fusion or conjugate, with a toxin peptide analog fused to the C-terminal end of one of the HC monomers. FIG. 94G represents a bivalent HT antibody Ab HC-toxin peptide analog fusion or conjugate having toxin peptide analogs on the C-terminal ends of both HC monomers. FIG. 94H represents a monovalent HT toxin peptide analog-LC Ab, with the toxin peptide analog fused to the N-terminal end of one of the LC monomers. FIG. 94I represents a monovalent HT toxin peptide analog-HC Ab, with the toxin peptide analog fused to the N-terminal end of one of the HC monomers. FIG. 94J represents a monovalent HT Ab LC-toxin peptide analog fusion or conjugate (i.e., LC-toxin peptide analog fusion or conjugate+LC+2(HC)), with the toxin peptide analog fused to the C-terminal end of one of the LC monomers. FIG. 94K represents a bivalent HT Ab LC-toxin peptide analog fusion or conjugate (i.e., 2(LC-toxin peptide analog fusion or conjugate)+2(HC)), with toxin peptide analogs fused to the C-terminal end of both of the LC monomers. FIG. 94L represents a trivalent HT Ab LC-toxin peptide analog/HC-toxin peptide analog (i.e., 2(LC-toxin peptide analog fusion or conjugate)+HC-toxin peptide analog fusion or conjugate+HC), with the toxin peptide analogs fused to the C-terminal ends of both of the LC monomers and one of the HC monomers. FIG. 94M represents a bivalent antibody with a toxin peptide analog moiety inserted into an internal loop of the immunoglobulin Fc domain of each HC monomer. FIG. 94N represents a monovalent antibody with a toxin peptide analog moiety inserted into an internal loop of the immunoglobulin Fc domain of one of the HC monomers. Dimers or trimers will form spontaneously in certain host cells upon expression of a deoxyribonucleic acid (DNA) construct encoding a single chain. In other host cells, the cells can be placed in conditions favoring formation of dimers/trimers or the dimers/trimers can be formed in vitro. If more than one HC monomer, LC monomer, or immunoglobulin Fc domain monomer is part of a single embodiment, the individual monomers can be, if desired, identical or different from each other.

[0245] FIG. 95 shows a schematic representation of a Fc-peptide conjugate embodiment for illustrative purposes only. A homology model of the immunoglobulin anti-DNP mAb (E52C) hIgG1 Fc domain (homodimer of SEQ ID NO:544) is constructed from an immunoglobulin crystal structure (1HZH.pdb) and is depicted as a solid ribbon. Cys52 of SEQ ID NO:544, the site of conjugation, is rendered in CPK format. PEG11 linker is depicted as a solid tube, in an arbitrary conformation in this embodiment, connecting the C52 residue in the immunoglobulin Fc domain to an Atz residue in the peptide. Any other linkers described herein can be substituted for the PEG11 linker, for example see FIG. 91. Homology models of the JzTx-V peptide analog are displayed as a solid ribbon and shown in arbitrary relative orientations to the immunoglobulin in this embodiment. One peptide is shown to reflect the monvalent nature of this immunoglobulin-peptide conjugate, however bivalent, trivalent, or other multivalent embodiments can be made.

[0246] FIG. 96 shows a schematic representation of a Fc-peptide conjugate embodiment for illustrative purposes only. A homology model of the anti-DNP mAb (E52C) hIgG1 Fc domain (homodimer of SEQ ID NO:544) is constructed from an immunoglobulin crystal structure (1HZH.pdb) and is depicted as a solid ribbon. Cys52 residues of both Fc domain monomers (SEQ ID NO:544), are used as the sites of conjugation, and are rendered in CPK format. PEG11 linkers are depicted as solid tubes in this embodiment in an arbitrary conformation connecting the C52 residues in the immunoglobulin Fc domain to an Atz residue in the peptides. Any other linkers described herein can be substituted for the PEG11 linker, for example see FIG. 91. Homology models of the JzTx-V peptide analog are displayed as a solid ribbon and shown in arbitrary relative orientations to the immunoglobulin in this embodiment. Two peptides are shown to reflect the bivalent nature of immunoglobulin-peptide conjugate. Multivalent linkers as described herein allow for the display of more than two peptides.

[0247] FIG. 97 shows a schematic representation of an immunoglobulin-peptide conjugate embodiment for illustrative purposes only. A homology model of the anti-DNP mAb (E273C) hIgG1 (comprising immunoglobulin monomers SEQ ID NO:542; SEQ ID NO:543; SEQ ID NO:542; SEQ ID NO:543) is constructed from an immunoglobulin crystal structure (1HZH.pdb) and is depicted as a solid ribbon. Cys273, the site of conjugation, is rendered in CPK format. In this embodiment, a PEG11 linker is depicted as a solid tube in an arbitrary conformation connecting the C273 residue in the immunoglobulin to an Atz residue in the peptide. Any other linkers described herein can be substituted for the PEG11 linker, for example see FIG. 91. Homology models of the JzTx-V peptide analog are displayed as a solid ribbon and shown in arbitrary relative orientations to the immunoglobulin in this embodiment. One peptide is shown to reflect the monvalent nature of this immunoglobulin-peptide conjugate, however bivalent, trivalent, or other multivalent embodiments can be made.

[0248] FIG. 98 shows a schematic representation of an immunoglobulin-peptide conjugate embodiment for illustrative purposes only. A homology model of the anti-DNP mAb (E273C) hIgG1 (comprising immunoglobulin monomers SEQ ID NO:542; SEQ ID NO:543; SEQ ID NO:542; SEQ ID NO:543) is constructed from an immunoglobulin crystal structure (1HZH.pdb) and is depicted as a solid ribbon. Both Cys273 residues, the sites of conjugation, are rendered in CPK format. In this embodiment, PEG11 linkers are depicted as solid tubes in an arbitrary conformation connecting the C273 residues in the immunoglobulin to an Atz residue in each of the peptides. Any other linkers described herein can be substituted for the PEG11 linker, for example see FIG. 91. Homology models of the JzTx-V peptide analog are displayed as a solid ribbon and shown in arbitrary relative orientations to the immunoglobulin in this embodiment. Two peptides are shown to reflect the bivalent nature of immunoglobulin-peptide conjugate. Multivalent linkers as described herein allow for the display of more than two peptides.

[0249] FIG. 99 shows the effect of a JzTx-V peptide analog Pra-[Nle6; Glu28]JzTx-V(1-29) (SEQ ID No. 328) on TTX-sensitive Nav channels in C57 Black 6 mouse DRG neuron. Cell was held at −72 mV and peak inward Nav currents were measured at −10 mV. ‘Control’ trace shows Nav current before Seq ID No. 328, ‘300 nM Seq ID No. 328’ trace shows Nav current after Seq ID No. 328 addition, and ‘0.5 μM TTX’ trace shows Nav current after TTX. Note that 300 nM Seq ID No. 328 blocks approximately 90% of TTX-sensitive Nav current and 0.5 μM TTX completely blocks TTX-sensitive Nav current.

[0250] FIG. 100 shows the time course of increasing concentrations of Pra-[Nle6; Glu28]JzTx-V(1-29) (Seq ID No. 328) against TTX-sensitive Nav channels in C57 Black 6 mouse DRG neuron. Peak inward Nav currents were measured at −10 mV every 10 seconds in the presence of increasing concentrations of Seq ID No. 328; cell was held at either −120 mV (squares), a voltage where Nav channels are completely non-inactivated, or −72 mV (circles), a voltage that yields approximately 20% inactivation. ‘Ctrl’ indicates Nav current in the absence of Seq ID No. 328, ‘0.5 μM TTX’ indicates Nav current in the presence of 0.5 μM TTX, and ‘Wash’ indicates Nav current following removal of Seq ID No. 328 and TTX.

[0251] FIG. 101 shows the dose-response curves of Pra-[Nle6; Glu28]JzTx-V(1-29) (Seq ID No. 328) against TTX-sensitive Nav channels in two separate C57 Black 6 mouse DRG neurons. Peak inward Nav currents were measured at −10 mV in the presence of increasing concentrations of Seq ID No. 328 and divided by current before Seq ID No. 328 addition (I/I₀); cells were held at a voltage that yielded approximately 20% inactivation.

[0252] FIG. 102 shows the effect of Pra-[Nle6; Glu28]JzTx-V(1-29)(Seq ID No. 328) on human Nav1.7 Na channels expressed in HEK293 cells. Cell was held at −95 mV and peak inward Nav currents were measured at −10 mV. ‘Control’ trace shows Nav current before Seq ID No. 328, and ‘100 nM Seq ID No. 328’ trace shows Nav current after Seq ID No. 328 addition. Note that 100 nM Seq ID No. 328 blocks approximately 95% of Nav current.

[0253] FIG. 103 shows the time course of increasing concentrations of Pra-[Nle6; Glu28]JzTx-V(1-29) (Seq ID No. 328) against human Nav1.7 Na channels expressed in HEK293 cells. Peak inward Nav currents were measured at −10 mV every 10 seconds in the presence of increasing concentrations of Seq ID No. 328; cell was held at either −140 mV (squares), a voltage where Nav channels are completely non-inactivated, or −95 mV (circles), a voltage that yields approximately 20% inactivation. ‘Ctrl’ indicates Nav current in the absence of Seq ID No. 328 and ‘Wash’ indicates Nav current following removal of Seq ID No. 328.

[0254] FIG. 104 shows the dose-response curves of Pra-[Nle6; Glu28]JzTx-V(1-29) (Seq ID No. 328) against human Nav1.7 Na channels in two separate HEK293 cells. Peak inward Nav currents were measured at −10 mV in the presence of increasing concentrations of Pra-[Nle6; Glu28]JzTx-V(1-29) (Seq ID No. 328) and divided by current before Seq ID No. 328 addition (I/I₀); cells were held at a voltage that yielded approximately 20% inactivation.

[0255] FIG. 105 shows the effect of Pra-[Nle6; Glu28]JzTx-V(1-29) (Seq ID No. 328) on human Nav1.1 Na channels expressed in HEK293 cells. Cell was held at −70 mV and peak inward Nav currents were measured at −10 mV. ‘Control’ trace shows Nav current before Seq ID No. 328, and ‘1000 nM Seq ID No. 328’ trace shows Nav current after Seq ID No. 328 addition. Note that 1000 nM Pra-[Nle6; Glu28]JzTx-V(1-29) (Seq ID No. 328) blocks approximately 95% of Nav current.

[0256] FIG. 106 shows the time course of increasing concentrations of Pra-[Nle6; Glu28]JzTx-V(1-29) (Seq ID No. 328) against human Nav1.1 Na channels expressed in HEK293 cells. Peak inward Nav currents were measured at −10 mV every 10 seconds in the presence of increasing concentrations of Seq ID No. 328; cell was held at either −140 mV (squares), a voltage where Nav channels are completely non-inactivated, or −70 mV (circles), a voltage that yields approximately 20% inactivation. ‘Ctrl’ indicates Nav current in the absence of Seq ID No. 328 and ‘Wash’ indicates Nav current following removal of Pra-[Nle6; Glu28]JzTx-V(1-29) (Seq ID No. 328).

[0257] FIG. 107 shows the dose-response curves of Pra-[Nle6; Glu28]JzTx-V(1-29) (Seq ID No. 328) against human Nav1.1 Na channels in two separate HEK293 cells. Peak inward Nav currents were measured at −10 mV in the presence of increasing concentrations of Seq ID No. 328 and divided by current before Seq ID No. 328 addition (I/I₀); cells were held at a voltage that yielded approximately 20% inactivation.

[0258] FIG. 108 shows the effect of Pra-[Nle6; Glu28]JzTx-V(1-29) (Seq ID No. 328) on human Nav1.4 Na channels expressed in HEK293 cells. Cell was held at −78 mV and peak inward Nav currents were measured at −10 mV. ‘Control’ trace shows Nav current before Seq ID No. 328, and ‘1000 nM Seq ID No. 328’ trace shows Nav current after Seq ID No. 328 addition. Note that 1000 nM of Pra-[Nle6; Glu28]JzTx-V(1-29) (Seq ID No. 328) blocks approximately 90% of Nav current.

[0259] FIG. 109 shows the time course of increasing concentrations of Pra-[Nle6; Glu28]JzTx-V(1-29) (Seq ID No. 328) against human Nav1.4 Na channels expressed in HEK293 cells. Peak inward Nav currents were measured at −10 mV every 10 seconds in the presence of increasing concentrations of Pra-[Nle6; Glu28]JzTx-V(1-29) (Seq ID No. 328); cell was held at either −140 mV (squares), a voltage where Nav channels are completely non-inactivated, or −78 mV (circles), a voltage that yields approximately 20% inactivation. ‘Ctrl’ indicates Nav current in the absence of Seq ID No. 328 and ‘Wash’ indicates Nav current following removal of Pra-[Nle6; Glu28]JzTx-V(1-29) (Seq ID No. 328).

[0260] FIG. 110 shows the dose-response curves of Pra-[Nle6; Glu28]JzTx-V(1-29) (Seq ID No. 328) against human Nav1.4 Na channels in two separate HEK293 cells. Peak inward Nav currents were measured at −10 mV in the presence of increasing concentrations of Seq ID No. 328 and divided by current before Pra-[Nle6; Glu28]JzTx-V(1-29) (Seq ID No. 328) addition (I/I₀); cells were held at a voltage that yielded approximately 20% inactivation.

[0261] FIG. 111 shows the effect of Pra-[Nle6; Glu28]JzTx-V(1-29) (Seq ID No. 328) on human Nav1.5 Na channels expressed in HEK293 cells. Cell was held at −77 mV and peak inward Nav currents were measured at −10 mV. ‘Control’ trace shows Nav current before Seq ID No. 328, and ‘1000 nM Seq ID No. 328’ trace shows Nav current after Pra-[Nle6; Glu28]JzTx-V(1-29) (Seq ID No. 328 addition). Note that 1000 nM Seq ID No. 328 blocks less than 10% of Nav current.

[0262] FIG. 112 shows the time course of increasing concentrations of Pra-[Nle6; Glu28]JzTx-V(1-29) (Seq ID No. 328) against human Nav1.5 Na channels expressed in HEK293 cells. Peak inward Nav currents were measured at −10 mV every 10 seconds in the presence of increasing concentrations of Pra-[Nle6; Glu28]JzTx-V(1-29) (Seq ID No. 328); cell was held at either −140 mV (squares), a voltage where Nav channels are completely non-inactivated, or −77 mV (circles), a voltage that yields approximately 20% inactivation. ‘Ctrl’ indicates Nav current in the absence of Seq ID No. 328 and ‘Wash’ indicates Nav current following removal of Pra-[Nle6; Glu28]JzTx-V(1-29) (Seq ID No. 328).

[0263] FIG. 113 shows the dose-response curves of Pra-[Nle6; Glu28]JzTx-V(1-29) (Seq ID No. 328) against human Nav1.5 Na channels in two separate HEK293 cells. Peak inward Nav currents were measured at −10 mV in the presence of increasing concentrations of Seq ID No. 328 and divided by current before Seq ID No. 328 addition (I/I₀); cells were held at a voltage that yielded approximately 20% inactivation.

[0264] FIG. 114 shows the effect of Pra-[Nle6; Glu28]JzTx-V(1-29) (Seq ID No. 328) on human Nav1.6 Na channels expressed in HEK293 cells. Cell was held at −67 mV and peak inward Nav currents were measured at −10 mV. ‘Control’ trace shows Nav current before Seq ID No. 328, and ‘1000 nM Seq ID No. 328’ trace shows Nav current after Seq ID No. 328 addition. Note that 1000 nM Pra-[Nle6; Glu28]JzTx-V(1-29) (Seq ID No. 328) blocks the majority of Nav current.

[0265] FIG. 115 shows the time course of increasing concentrations of Pra-[Nle6; Glu28]JzTx-V(1-29) (Seq ID No. 328) against human Nav1.6 Na channels expressed in HEK293 cells. Peak inward Nav currents were measured at −10 mV every 10 seconds in the presence of increasing concentrations of Seq ID No. 328; cell was held at either −140 mV (squares), a voltage where Nav channels are completely non-inactivated, or −67 mV (circles), a voltage that yields approximately 20% inactivation. ‘Ctrl’ indicates Nav current in the absence of Pra-[Nle6; Glu28]JzTx-V(1-29) (Seq ID No. 328) and ‘Wash’ indicates Nav current following removal of Pra-[Nle6; Glu28]JzTx-V(1-29) (Seq ID No. 328).

[0266] FIG. 116 shows the dose-response curves of Pra-[Nle6; Glu28]JzTx-V(1-29) (Seq ID No. 328) against human Nav1.6 Na channels in two separate HEK293 cells. Peak inward Nav currents were measured at −10 mV in the presence of increasing concentrations of Seq ID No. 328 and divided by current before Pra-[Nle6; Glu28]JzTx-V(1-29) (Seq ID No. 328) addition (I/I₀); cells were held at a voltage that yielded approximately 20% inactivation.

[0267] FIG. 117 shows the effect of Pra-[Nle6; Glu28]JzTx-V(1-29) (Seq ID No. 328) on human Nav1.2 Na channels expressed in HEK293 cells. Cell was held at −65 mV and peak inward Nav currents were measured at −10 mV. ‘Control’ trace shows Nav current before Seq ID No. 328, and ‘1000 nM Seq ID No. 328’ trace shows Nav current after Seq ID No. 328 addition. Note that 1000 nM Pra-[Nle6; Glu28]JzTx-V(1-29) (Seq ID No. 328) blocks the majority of Nav current.

[0268] FIG. 118 shows the time course of increasing concentrations of Pra-[Nle6; Glu28]JzTx-V(1-29) (Seq ID No. 328) against human Nav1.2 Na channels expressed in HEK293 cells. Peak inward Nav currents were measured at −10 mV every 10 seconds in the presence of increasing concentrations of Pra-[Nle6; Glu28]JzTx-V(1-29) (Seq ID No. 328); cell was held at either −140 mV (squares), a voltage where Nav channels are completely non-inactivated, or −65 mV (circles), a voltage that yields approximately 20% inactivation. ‘Ctrl’ indicates Nav current in the absence of Seq ID No. 328 and ‘Wash’ indicates Nav current following removal of Pra-[Nle6; Glu28]JzTx-V(1-29) (Seq ID No. 328).

[0269] FIG. 119 shows the dose-response curves of Pra-[Nle6; Glu28]JzTx-V(1-29) (Seq ID No. 328) against human Nav1.2 Na channels in two separate HEK293 cells. Peak inward Nav currents were measured at −10 mV in the presence of increasing concentrations of Pra-[Nle6; Glu28]JzTx-V(1-29) (Seq ID No. 328) and divided by current before Seq ID No. 328 addition (I/I₀); cells were held at a voltage that yielded approximately 20% inactivation.

[0270] FIG. 120 shows the effect of Pra-[Nle6; Glu28]JzTx-V(1-29) (Seq ID No. 328) on human Nav1.3 Na channels expressed in CHO cells. Cell was held at −68 mV and peak inward Nav currents were measured at −10 mV. ‘Control’ trace shows Nav current before Seq ID No. 328, and ‘1000 nM Seq ID No. 328’ trace shows Nav current after Seq ID No. 328 addition. Note that 1000 nM Pra-[Nle6; Glu28]JzTx-V(1-29) (Seq ID No. 328) blocks approximately 90% of Nav current.

[0271] FIG. 121 shows the time course of increasing concentrations of Pra-[Nle6; Glu28]JzTx-V(1-29) (Seq ID No. 328) against human Nav1.3 Na channels expressed in CHO cells. Peak inward Nav currents were measured at −10 mV every 10 seconds in the presence of increasing concentrations of Pra-[Nle6; Glu28]JzTx-V(1-29) (Seq ID No. 328); cell was held at either −140 mV (squares), a voltage where Nav channels are completely non-inactivated, or −68 mV (circles), a voltage that yields approximately 20% inactivation. ‘Ctrl’ indicates Nav current in the absence of Seq ID No. 328 and ‘Wash’ indicates Nav current following removal of Seq ID No. 328.

[0272] FIG. 122 shows the dose-response curves of Pra-[Nle6; Glu28]JzTx-V(1-29) (Seq ID No. 328) against human Nav1.3 Na channels in two separate CHO cells. Peak inward Nav currents were measured at −10 mV in the presence of increasing concentrations of Pra-[Nle6; Glu28]JzTx-V(1-29) (Seq ID No. 328) and divided by current before Seq ID No. 328 addition (I/I₀); cells were held at a voltage that yielded approximately 20% inactivation.

[0273] FIG. 123 shows the effect of Pra-[Nle6; Glu28]JzTx-V(1-29) (Seq ID No. 328) on hNav1.8 channels in CHO cell. Cell was held at −82 mV and peak inward Nav currents were measured at −10 mV. ‘Control’ trace shows Nav current before Seq ID No. 328, and ‘1000 nM Seq ID No. 328’ trace shows Nav current after Seq ID No. 328 addition. Note that 1000 nM Seq ID No. 328 blocked approximately 30% of TTX-resistant hNav1.8 current. All solutions contained 0.5 μM TTX to block endogenous TTX-sensitive Nav currents.

[0274] FIG. 124 shows the time course of increasing concentrations of Pra-[Nle6; Glu28]JzTx-V(1-29) (Seq ID No. 328) against hNav1.8 channels in CHO cell. Peak inward Nav currents were measured at −10 mV every 10 seconds in the presence of increasing concentrations of Seq ID No. 328; cell was held at either −140 mV (squares) or −82 mV (circles). ‘TTX’ indicates Nav current in the absence of Pra-[Nle6; Glu28]JzTx-V(1-29) (Seq ID No. 328) to block endogenous TTX-sensitive channels, and ‘Wash’ indicates Nav current following removal of Seq ID No. 328 and TTX. 0.5 μM TTX was present in all solutions when cells were held at −82 mV.

[0275] FIG. 125 shows the dose-response curves of Pra-[Nle6; Glu28]JzTx-V(1-29) (Seq ID No. 328) against hNav1.8 channels in two separate CHO cells. Peak inward Nav currents were measured at −10 mV in the presence of increasing concentrations of Seq ID No. 328 and divided by current before Pra-[Nle6; Glu28]JzTx-V(1-29) (Seq ID No. 328) addition (I/I₀); cells were held at a voltage that yielded approximately 20% inactivation.

[0276] FIG. 126 shows the effect of Pra-[Nle6; Glu28]JzTx-V(1-29) (Seq ID No. 328) on TTX-sensitive Nay channels in Sprague Dawley rat DRG neuron. Cell was held at −78 mV and peak inward Nay currents were measured at −10 mV. ‘Control’ trace shows Nay current before Seq ID No. 328, ‘300 nM Seq ID No. 328’ trace shows Nay current after Pra-[Nle6; Glu28]JzTx-V(1-29) (Seq ID No. 328) addition, and ‘0.5 μM TTX’ trace shows Nay current after TTX. Note that 300 nM Seq ID No. 328 blocks approximately 85% of TTX-sensitive Nay current.

[0277] FIG. 127 shows the time course of increasing concentrations of Pra-[Nle6; Glu28]JzTx-V(1-29) (Seq ID No. 328) against TTX-sensitive Nay channels in Sprague Dawley rat DRG neuron. Peak inward Nay currents were measured at −10 mV every 10 seconds in the presence of increasing concentrations of Seq ID No. 328; cell was held at either −120 mV (squares), a voltage where Nay channels are completely non-inactivated, or −78 mV (circles), a voltage that yields approximately 20% inactivation. ‘Ctrl’ indicates Nay current in the absence of Pra-[Nle6; Glu28]JzTx-V(1-29) (Seq ID No. 328), ‘0.5 μM TTX’ indicates Nay current in the presence of 0.5 μM TTX, and ‘Wash’ indicates Nay current following removal of Pra-[Nle6; Glu28]JzTx-V(1-29) (Seq ID No. 328) and TTX.

[0278] FIG. 128 shows the dose-response curves of Pra-[Nle6; Glu28]JzTx-V(1-29) (Seq ID No. 328) against TTX-sensitive Nay channels in two separate Sprague Dawley rat DRG neurons. Peak inward Nay currents were measured at −10 mV in the presence of increasing concentrations of Seq ID No. 328 and divided by current before Pra-[Nle6; Glu28]JzTx-V(1-29) (Seq ID No. 328) addition (I/I₀); cells were held at a voltage that yielded approximately 20% inactivation.

[0279] FIG. 129 shows the effect of CyA-[Nle6,Pra17,Glu28]JzTx-V(1-29) (Seq ID No. 395) on TTX-sensitive Nay channels in C57 Black 6 mouse DRG neuron. Cell was held at −77 mV and peak inward Nay currents were measured at −10 mV. ‘Control’ trace shows Nay current before Seq ID No. 395, ‘300 nM Seq ID No. 395’ trace shows Nay current after Seq ID No. 395 addition, and ‘0.5 μM TTX’ trace shows Nay current after TTX. Note that 300 nM CyA-[Nle6,Pra17,Glu28]JzTx-V(1-29) (Seq ID No. 395) blocks the majority of TTX-sensitive Nay current.

[0280] FIG. 130 shows the time course of increasing concentrations of CyA-[Nle6,Pra17,Glu28]JzTx-V(1-29) (Seq ID No. 395) against TTX-sensitive Nay channels in C57 Black 6 mouse DRG neuron. Peak inward Nay currents were measured at −10 mV every 10 seconds in the presence of increasing concentrations of Seq ID No. 395; cell was held at either −120 mV (squares), a voltage where Nav channels are completely non-inactivated, or −77 mV (circles), a voltage that yields approximately 20% inactivation. ‘Ctrl’ indicates Nav current in the absence of CyA-[Nle6,Pra17,Glu28]JzTx-V(1-29) (Seq ID No. 395), ‘0.5 μM TTX’ indicates Nav current in the presence of 0.5 μM TTX, and ‘Wash’ indicates Nav current following removal of CyA-[Nle6,Pra17,Glu28]JzTx-V(1-29) (Seq ID No. 395) and TTX.

[0281] FIG. 131 shows the dose-response curves of CyA-[Nle6,Pra17,Glu28]JzTx-V(1-29) (Seq ID No. 395) against TTX-sensitive Nav channels in two separate C57 Black 6 mouse DRG neurons. Peak inward Nav currents were measured at −10 mV in the presence of increasing concentrations of CyA-[Nle6,Pra17,Glu28]JzTx-V(1-29) (Seq ID No. 395) and divided by current before Seq ID No. 395 addition (I/I₀); cells were held at a voltage that yielded approximately 20% inactivation.

[0282] FIG. 132 shows the effect of CyA-[Nle6,Pra17,Glu28]JzTx-V(1-29) (Seq ID No. 395) on TTX-sensitive Nav channels in Sprague Dawley rat DRG neuron. Cell was held at −80 mV and peak inward Nav currents were measured at −10 mV. ‘Control’ trace shows Nav current before CyA-[Nle6,Pra17,Glu28]JzTx-V(1-29) (Seq ID No. 395), ‘300 nM Seq ID No. 395’ trace shows Nav current after Seq ID No. 395 addition, and ‘0.5 μM TTX’ trace shows Nav current after TTX.

[0283] FIG. 133 shows the time course of increasing concentrations of CyA-[Nle6,Pra17,Glu28]JzTx-V(1-29) (Seq ID No. 395) against TTX-sensitive Nav channels in Sprague Dawley rat DRG neuron. Peak inward Nav currents were measured at −10 mV every 10 seconds in the presence of increasing concentrations of CyA-[Nle6,Pra17,Glu28]JzTx-V(1-29) (Seq ID No. 395); cell was held at either −120 mV (squares), a voltage where Nav channels are completely non-inactivated, or −80 mV (circles), a voltage that yields approximately 20% inactivation. ‘Ctrl’ indicates Nav current in the absence of Seq ID No. 395, ‘0.5 μM TTX’ indicates Nav current in the presence of 0.5 μM TTX, and ‘Wash’ indicates Nav current following removal of CyA-[Nle6,Pra17,Glu28]JzTx-V(1-29) (Seq ID No. 395) and TTX.

[0284] FIG. 134 shows the dose-response curves of CyA-[Nle6,Pra17,Glu28]JzTx-V(1-29) (Seq ID No. 395) against TTX-sensitive Nav channels in two separate Sprague Dawley rat DRG neurons. Peak inward Nav currents were measured at −10 mV in the presence of increasing concentrations of CyA-[Nle6,Pra17,Glu28]JzTx-V(1-29) (Seq ID No. 395) and divided by current before Seq ID No. 395 addition (I/I₀); cells were held at a voltage that yielded approximately 20% inactivation.

[0285] FIG. 135 shows the effect of Immunoglobulin Peptide Conjugate 3 (see, Example 9, Table 21) on TTX-sensitive Nav channels in C57 Black 6 mouse DRG neuron. Cell was held at −78 mV and peak inward Nav currents were measured at −10 mV. ‘Control’ trace shows Nav current before Immunoglobulin Peptide Conjugate 3, ‘300 nM Immunoglobulin Peptide Conjugate 3’ trace shows Nav current after Immunoglobulin Peptide Conjugate 3 addition, and ‘0.5 μM TTX’ trace shows Nav current after TTX. Note that 300 nM Immunoglobulin Peptide Conjugate 3 blocks the majority of TTX-sensitive Nav current.

[0286] FIG. 136 shows the time course of increasing concentrations of Immunoglobulin Peptide Conjugate 3 (see, Example 9, Table 21) against TTX-sensitive Nav channels in C57 Black 6 mouse DRG neuron. Peak inward Nav currents were measured at −10 mV every 10 seconds in the presence of increasing concentrations of Immunoglobulin Peptide Conjugate 3; cell was held at either −120 mV (squares), a voltage where Nav channels are completely non-inactivated, or −78 mV (circles), a voltage that yields approximately 20% inactivation. ‘Ctrl’ indicates Nav current in the absence of Immunoglobulin Peptide Conjugate 3, ‘0.5 μM TTX’ indicates Nav current in the presence of 0.5 μM TTX, and ‘Wash’ indicates Nav current following removal of Immunoglobulin Peptide Conjugate 3 and TTX.

[0287] FIG. 137 shows the dose-response curves of Immunoglobulin Peptide Conjugate 3 (see, Example 9, Table 21) against TTX-sensitive Nav channels in two separate C57 Black 6 mouse DRG neurons. Peak inward Nav currents were measured at −10 mV in the presence of increasing concentrations of Immunoglobulin Peptide Conjugate 3 and divided by current before Immunoglobulin Peptide Conjugate 3 addition (I/I₀); cells were held at a voltage that yielded approximately 20% inactivation.

[0288] FIG. 138 shows the effect of Immunoglobulin Peptide Conjugate 8 (see, Example 9, Table 21) on TTX-sensitive Nav channels in C57 Black 6 mouse DRG neuron. Cell was held at −66 mV and peak inward Nav currents were measured at −10 mV. ‘Control’ trace shows Nav current before Immunoglobulin Peptide Conjugate 8, ‘3000 nM Immunoglobulin Peptide Conjugate 8’ trace shows Nav current after Immunoglobulin Peptide Conjugate 8 addition, and ‘0.5 μM TTX’ trace shows Nav current after TTX. Note that 3000 nM Immunoglobulin Peptide Conjugate 8 blocks over 75% of TTX-sensitive Nav current and 0.5 μM TTX completely blocks TTX-sensitive Nav current.

[0289] FIG. 139 shows the time course of increasing concentrations of Immunoglobulin Peptide Conjugate 8 (see, Example 9, Table 21) against TTX-sensitive Nav channels in C57 Black 6 mouse DRG neuron. Peak inward Nav currents were measured at −10 mV every 10 seconds in the presence of increasing concentrations of Immunoglobulin Peptide Conjugate 8; cell was held at either −120 mV (squares), a voltage where Nav channels are completely non-inactivated, or −66 mV (circles), a voltage that yields approximately 20% inactivation. ‘Ctrl’ indicates Nav current in the absence of Immunoglobulin Peptide Conjugate 8, ‘0.5 μM TTX’ indicates Nav current in the presence of 0.5 μM TTX, and ‘Wash’ indicates Nav current following removal of Immunoglobulin Peptide Conjugate 8 and TTX.

[0290] FIG. 140 shows the dose-response curves of Immunoglobulin Peptide Conjugate 8 (see, Example 9, Table 21) against TTX-sensitive Nav channels in two separate C57 Black 6 mouse DRG neurons. Peak inward Nav currents were measured at −10 mV in the presence of increasing concentrations of Immunoglobulin Peptide Conjugate 8 and divided by current before Immunoglobulin Peptide Conjugate 8 addition (I/I₀); cells were held at a voltage that yielded approximately 20% inactivation.

[0291] FIG. 141 shows the effect of Immunoglobulin Peptide Conjugate 5 (see, Example 9, Table 21) on TTX-sensitive Nav channels in C57 Black 6 mouse DRG neuron. Cell was held at −100 mV and peak inward Nav currents were measured at −10 mV. ‘Control’ trace shows Nav current before Immunoglobulin Peptide Conjugate 5, ‘185 nM Immunoglobulin Peptide Conjugate 5’ trace shows Nav current after Immunoglobulin Peptide Conjugate 5 addition, and ‘0.5 μM TTX’ trace shows Nav current after TTX. Note that 185 nM Immunoglobulin Peptide Conjugate 5 blocks approximately 70% of TTX-sensitive Nav current and 0.5 μM TTX completely blocks TTX-sensitive Nav current.

[0292] FIG. 142 shows the time course of increasing concentrations of Immunoglobulin Peptide Conjugate 5 (see, Example 9, Table 21) against TTX-sensitive Nav channels in C57 Black 6 mouse DRG neuron. Peak inward Nav currents were measured at −10 mV every 10 seconds in the presence of increasing concentrations of Immunoglobulin Peptide Conjugate 5; cell was held at either −120 mV (squares), a voltage where Nav channels are completely non-inactivated, or −100 mV (circles), a voltage that yields approximately 20% inactivation. ‘Ctrl’ indicates Nav current in the absence of Immunoglobulin Peptide Conjugate 5, ‘0.5 μM TTX’ indicates Nav current in the presence of 0.5 μM TTX, and ‘Wash’ indicates Nav current following removal of Immunoglobulin Peptide Conjugate 5 and TTX.

[0293] FIG. 143 shows the dose-response curves of Immunoglobulin Peptide Conjugate 5 (see, Example 9, Table 21) against TTX-sensitive Nav channels in two separate C57 Black 6 mouse DRG neurons. Peak inward Nav currents were measured at −10 mV in the presence of increasing concentrations of Immunoglobulin Peptide Conjugate 5 and divided by current before Immunoglobulin Peptide Conjugate 5 addition (I/I₀); cells were held at a voltage that yielded approximately 20% inactivation.

[0294] FIG. 144 shows the effect of Immunoglobulin Peptide Conjugate 7 (see, Example 9, Table 21) on TTX-sensitive Nav channels in C57 Black 6 mouse DRG neuron. Cell was held at −72 mV and peak inward Nav currents were measured at −10 mV. ‘Control’ trace shows Nav current before Immunoglobulin Peptide Conjugate 7, ‘300 nM Immunoglobulin Peptide Conjugate 7’ trace shows Nav current after Immunoglobulin Peptide Conjugate 7 addition, and ‘0.5 μM TTX’ trace shows Nav current after TTX. Note that 300 nM Immunoglobulin Peptide Conjugate 7 blocks approximately 90% of TTX-sensitive Nav current.

[0295] FIG. 145 shows the time course of increasing concentrations of Immunoglobulin Peptide Conjugate 7 (see, Example 9, Table 21) against TTX-sensitive Nav channels in C57 Black 6 mouse DRG neuron. Peak inward Nav currents were measured at −10 mV every 10 seconds in the presence of increasing concentrations of Immunoglobulin Peptide Conjugate 7; cell was held at either −120 mV (squares), a voltage where Nav channels are completely non-inactivated, or −72 mV (circles), a voltage that yields approximately 20% inactivation. ‘Ctrl’ indicates Nav current in the absence of Immunoglobulin Peptide Conjugate 7, ‘0.5 μM TTX’ indicates Nav current in the presence of 0.5 μM TTX, and ‘Wash’ indicates Nav current following removal of Immunoglobulin Peptide Conjugate 7 and TTX.

[0296] FIG. 146 shows the dose-response curves of Immunoglobulin Peptide Conjugate 7 (see, Example 9, Table 21) against TTX-sensitive Nav channels in two separate C57 Black 6 mouse DRG neurons. Peak inward Nav currents were measured at −10 mV in the presence of increasing concentrations of Immunoglobulin Peptide Conjugate 7 and divided by current before Immunoglobulin Peptide Conjugate 7 addition (I/I₀); cells were held at a voltage that yielded approximately 20% inactivation.

[0297] FIG. 147 shows the effect of Pra-[Nle6; Glu14,28]JzTx-V(1-29) (Seq ID No. 717) on TTX-sensitive Nav channels in C57 Black 6 mouse DRG neuron. Cell was held at −75 mV and peak inward Nav currents were measured at −10 mV. ‘Control’ trace shows Nav current before Seq ID No. 717, ‘1000 nM Seq ID No. 717’ trace shows Nav current after Pra-[Nle6; Glu14,28]JzTx-V(1-29) (Seq ID No. 717) addition, and ‘0.5 μM TTX’ trace shows Nav current after TTX. Note that 1000 nM Pra-[Nle6; Glu14,28]JzTx-V(1-29) (Seq ID No. 717) blocks approximately 90% of TTX-sensitive Nav current.

[0298] FIG. 148 shows the time course of increasing concentrations of Pra-[Nle6; Glu14,28]JzTx-V(1-29) (Seq ID No. 717) against TTX-sensitive Nav channels in C57 Black 6 mouse DRG neuron. Peak inward Nav currents were measured at −10 mV every 10 seconds in the presence of increasing concentrations of Pra-[Nle6; Glu14,28]JzTx-V(1-29) (Seq ID No. 717); cell was held at either −120 mV (squares), a voltage where Nav channels are completely non-inactivated, or −75 mV (circles), a voltage that yields approximately 20% inactivation. ‘Ctrl’ indicates Nav current in the absence of Seq ID No. 717, ‘0.5 μM TTX’ indicates Nav current in the presence of 0.5 μM TTX, and ‘Wash’ indicates Nav current following removal of Pra-[Nle6; Glu14,28]JzTx-V(1-29) (Seq ID No. 717) and TTX.

[0299] FIG. 149 shows the dose-response curves of Pra-[Nle6; Glu14,28]JzTx-V(1-29) (Seq ID No. 717) against TTX-sensitive Nav channels in two separate C57 Black 6 mouse DRG neurons. Peak inward Nav currents were measured at −10 mV in the presence of increasing concentrations of Pra-[Nle6; Glu14,28]JzTx-V(1-29) (Seq ID No. 717) and divided by current before Seq ID No. 717 addition (I/I₀); cells were held at a voltage that yielded approximately 20% inactivation.

[0300] FIG. 150 shows the effect of CyA-[Nle6,Atz(NPEG10)17,Glu28]JzTx-V(1-29) (Seq ID No. 443) on TTX-sensitive Nav channels in C57 Black 6 mouse DRG neuron. Cell was held at −65 mV and peak inward Nav currents were measured at −10 mV. ‘Control’ trace shows Nav current before CyA-[Nle6,Atz(NPEG10)17,Glu28]JzTx-V(1-29) (Seq ID No. 443), ‘300 nM Seq ID No. 443’ trace shows Nav current after Seq ID No. 443 addition, and ‘0.5 μM TTX’ trace shows Nav current after TTX. Note that 300 nM CyA-[Nle6,Atz(NPEG10)17,Glu28]JzTx-V(1-29) (Seq ID No. 443) blocks over 75% of TTX-sensitive Nav current.

[0301] FIG. 151 shows the time course of increasing concentrations of CyA-[Nle6,Atz(NPEG10)17,Glu28]JzTx-V(1-29) (Seq ID No. 443) against TTX-sensitive Nav channels in C57 Black 6 mouse DRG neuron. Peak inward Nav currents were measured at −10 mV every 10 seconds in the presence of increasing concentrations of Seq ID No. 443; cell was held at either −120 mV (squares), a voltage where Nav channels are completely non-inactivated, or −65 mV (circles), a voltage that yields approximately 20% inactivation. ‘Ctrl’ indicates Nav current in the absence of CyA-[Nle6,Atz(NPEG10)17,Glu28]JzTx-V(1-29) (Seq ID No. 443); ‘0.5 μM TTX’ indicates Nav current in the presence of 0.5 μM TTX, and ‘Wash’ indicates Nav current following removal of Seq ID No. 443 and TTX.

[0302] FIG. 152 shows the dose-response curves of CyA-[Nle6,Atz(NPEG10)17,Glu28]JzTx-V(1-29) (Seq ID No. 443) against TTX-sensitive Nav channels in two separate C57 Black 6 mouse DRG neurons. Peak inward Nav currents were measured at −10 mV in the presence of increasing concentrations of Seq ID No. 443 and divided by current before CyA-[Nle6,Atz(NPEG10)17,Glu28]JzTx-V(1-29) (Seq ID No. 443) addition (I/I₀); cells were held at a voltage that yielded approximately 20% inactivation.

[0303] FIG. 153 shows the effect of Pra-[Nle6; Glu12,28]JzTx-V(1-29) (Seq ID No. 715) on TTX-sensitive Nav channels in C57 Black 6 mouse DRG neuron. Cell was held at −88 mV and peak inward Nav currents were measured at −10 mV. ‘Control’ trace shows Nav current before Seq ID No. 715, ‘1000 nM Seq ID No. 715’ trace shows Nav current after Seq ID No. 715 addition, and ‘0.5 μM TTX’ trace shows Nav current after TTX. Note that 1000 nM Pra-[Nle6; Glu12,28]JzTx-V(1-29) (Seq ID No. 715) blocks approximately 90% of TTX-sensitive Nav current.

[0304] FIG. 154 shows the time course of increasing concentrations of Pra-[Nle6; Glu12,28]JzTx-V(1-29) (Seq ID No. 715) against TTX-sensitive Nav channels in C57 Black 6 mouse DRG neuron. Peak inward Nav currents were measured at −10 mV every 10 seconds in the presence of increasing concentrations of Seq ID No. 715; cell was held at either −120 mV (squares), a voltage where Nav channels are completely non-inactivated, or −88 mV (circles), a voltage that yields approximately 20% inactivation. ‘Ctrl’ indicates Nav current in the absence of Pra-[Nle6; Glu12,28]JzTx-V(1-29) (Seq ID No. 715), ‘0.5 μM TTX’ indicates Nav current in the presence of 0.5 μM TTX, and ‘Wash’ indicates Nav current following removal of Pra-[Nle6; Glu12,28]JzTx-V(1-29) (Seq ID No. 715) and TTX.

[0305] FIG. 155 shows the dose-response curves of Pra-[Nle6; Glu12,28]JzTx-V(1-29) (Seq ID No. 715) against TTX-sensitive Nav channels in two separate C57 Black 6 mouse DRG neurons. Peak inward Nav currents were measured at −10 mV in the presence of increasing concentrations of Pra-[Nle6; Glu12,28]JzTx-V(1-29) (Seq ID No. 715) and divided by current before Seq ID No. 715 addition (I/I₀); cells were held at a voltage that yielded approximately 20% inactivation.

[0306] FIG. 156 shows the effect of Pra-[Nle6; 5-BrW24; Glu28]JzTx-V(1-29) (Seq ID No. 858) on human Nav1.7 Na channels expressed in HEK293 cells. Cell was held at −105 mV and peak inward Nav currents were measured at −10 mV. ‘Control’ trace shows Nav current before Seq ID No. 858, and ‘10000 pM (10 nM) Seq ID No. 858’ trace shows Nav current after Pra-[Nle6; 5-BrW24; Glu28]JzTx-V(1-29) (Seq ID No. 858) addition. Note that 100 nM Pra-[Nle6; 5-BrW24; Glu28]JzTx-V(1-29) (Seq ID No. 858) blocks approximately 90% of Nav current.

[0307] FIG. 157 shows the time course of increasing concentrations of Pra-[Nle6; 5-BrW24; Glu28]JzTx-V(1-29) (Seq ID No. 858) against human Nav1.7 Na channels expressed in HEK293 cells. Peak inward Nav currents were measured at −10 mV every 10 seconds in the presence of increasing concentrations of Pra-[Nle6; 5-BrW24; Glu28]JzTx-V(1-29) (Seq ID No. 858); cell was held at either −140 mV (squares), a voltage where Nav channels are completely non-inactivated, or −105 mV (circles), a voltage that yields approximately 20% inactivation. ‘Ctrl’ indicates Nav current in the absence of Pra-[Nle6; 5-BrW24; Glu28]JzTx-V(1-29) (Seq ID No. 858) and ‘Wash’ indicates Nav current following removal of Seq ID No. 858.

[0308] FIG. 158 shows the dose-response curves of Pra-[Nle6; 5-BrW24; Glu28]JzTx-V(1-29) (Seq ID No. 858) against human Nav1.7 Na channels in two separate HEK293 cells. Peak inward Nav currents were measured at −10 mV in the presence of increasing concentrations of Pra-[Nle6; 5-BrW24; Glu28]JzTx-V(1-29) (Seq ID No. 858) and divided by current before Seq ID No. 858 addition (I/I₀); cells were held at a voltage that yielded approximately 20% inactivation.

[0309] FIG. 159 shows the mean concentration—time profile of CyA-[Nle6,Pra17,Glu28]JzTx-V(1-29) (SEQ ID NO:395) in CD-1 male mouse following a subcutaneous dose at 2 mpk. CyA-[Nle6,Pra17,Glu28]JzTx-V(1-29) (SEQ ID NO:395) was rapidly absorbed with a mean Cmax of 0.73 μM observed at 1 h following a subcutaneous dose at 2 mg/kg. Mean Cmax concentration was 46-fold over the moue DRG Nav1.7 IC 50. The half-life of the peptide was approximately 2.3 hours.

[0310] FIG. 160 shows the mean concentrations—time profiles of CyA-[Nle6,Pra17,Glu28]JzTx-V(1-29) (SEQ ID NO:395) in Male Sprague-Dawley rats following a subcutaneous dose at 1, 3 or 10 mg/kg. SEQ ID NO:395 was dose to rats at 1, 3 or 10 mg/kg by a single subcutaneous administration. All the doses were tolerated. Tmax was observed at 1, 3 and 3 hours with the corresponding mean Cmax values of 0.079, 0.43 and 0.97 μM for the 1, 3 and 10 mg/kg dose groups, respectively. The mean Cmax values were 56-, 306- and 684-fold over the rat DRG Nav1.7. T1/2 was not calculated due to the limited sampling scheme.

[0311] FIG. 161 shows the mean concentrations—time profiles of Pra-[Nle6; Glu28]JzTx-V(1-29) (SEQ ID NO:328) in Male CD-1 mice following a subcutaneous dose at 5 mg/kg. Pra-[Nle6; Glu28]JzTx-V(1-29) (SEQ ID NO:328) was absorbed slowly with a mean Cmax of 2.2 μM observed at 2 h following a subcutaneous dose at 5 mg/kg. Mean Cmax concentration was 196-fold over the moue DRG Nav1.7 IC 50. The half-life of the peptide was approximately 4.5 hours.

[0312] FIG. 162 shows the mean concentrations—time profiles of Immunoglobulin Peptide Conjugate 3 (see, Example 9, Table 21) in Male CD-1 mice following a single intravenous (IV) or subcutaneous (SC) dose at 5 mg/kg. The clearance (CL), volume of distribution at the steady state (Vdss) and half-life of Immunoglobulin Peptide Conjugate 3 following IV administration were 0.079 L/hr/kg, 12.3 L/hr and 113 hours, respectively. The absorption of 2945893 was complete (100%) following a single dose subcutaneous administration with Cmax observed at 24 hours post-dose with a mean concentration of 0.0025 μM.

[0313] FIG. 163 shows the mean concentrations—time profiles of Immunoglobulin Peptide Conjugate 7 (see, Example 9, Table 21) in Male CD-1 mice following a single intravenous (IV) dose at 5 mg/kg. The clearance (CL), volume of distribution at the steady state (Vdss) and half-life of Immunoglobulin Peptide Conjugate 7 following IV administration to male CD-1 mice were 0.01 L/hr/kg, 0.25 L/hr and 27 hours, respectively.

[0314] FIG. 164 shows the mean concentrations—time profiles of Immunoglobulin Peptide Conjugate 5 (see, Example 9, Table 21) in Male CD-1 mice following a single intravenous (IV) dose at 5 mg/kg. The clearance (CL), volume of distribution at the steady state (Vdss) and half-life of Immunoglobulin Peptide Conjugate 5 following IV administration to male CD-1 mice were 0.06 L/hr/kg, 3.14 L/hr and 38.4 hours, respectively.

[0315] FIG. 165 shows the size exclusion chromatography (SEC) analysis (UV absorbance at 280 nM) of Immunoglobulin Peptide Conjugate 3 (see, Example 9, Table 21) prepared by the redox method. The desired conjugate has a purity of 96.95% by this method with 3.05% higher molecular weight species.

[0316] FIG. 166A-C shows LC/MS-TOF analysis of three different samples of Immunglobulin Peptide Conjugate 3 (see, Example 9, Table 21). FIG. 166A shows the data from intact sample (non-deglycosylated); FIG. 166B shows data from a deglycosylated sample; and FIG. 166C shows data from a deglycosylated and reduced sample. In FIG. 166A-C, the top row contains the total ion count (TIC) trace from the LC-MS-TOF. The second row displays the chromatogram (UV absorbance at 280 nM). The third row shows the charge envelope of the extracted MS spectrum from the major peak in the TIC trace. The bottom row is the deconvoluted mass spectrum resulting from the extracted MS spectrum. The deconvoluted mass of the intact sample was 156352.5 Da, which is consistent with the conjugation of two peptide-linker constructs. The deconvoluted mass of the deglycosylated sample was 153141.5 Da after loss of the sugar(s). The deconvoluted masses observed for the deglycosylated and reduced sample were 23220.8 Da and 53357.1 Da, corresponding to the IgG light chain and IgG heavy with a conjugated peptide-linker construct, respectively. The deconvoluted mass of 34776.3 Da corresponds to the PNGase enzyme in the sample.

[0317] FIG. 167 shows the SDS-PAGE gel electrophoresis analysis of the non-reduced (lane 2) and reduced (lane 3) samples of Immunoglobulin Peptide Conjugate 3 (see, Example 9, Table 21) with the standard MW ladder (lane 1). The upper band in lane 3 corresponds to the IgG heavy chain conjugated to the peptide-linker, and the lower band corresponds to the IgG light chain.

[0318] FIG. 168A-B shows the size exclusion chromatography (SEC) analysis (UV absorbance at 280 nM) of HSA-Peptide Conjugates 1 (FIG. 168A) and 2 (FIG. 168B). HSA-Peptide Conjugate 1 (see, Table 23) has a purity of 98.8% by this method with 1.2% higher molecular weight species, and HSA-Peptide Conjugate 2 (see, Table 23) has a purity of >99% by this method.

[0319] FIG. 169A-B shows the LC/MS-TOF analysis of HSA-Peptide Conjugates 1 (FIG. 169A) and 2 (FIG. 169B) (see, Table 23). The top row contains the total ion count (TIC) trace from the LC-MS-TOF. The second row displays the chromatogram (UV absorbance at 280 nM). The third row shows the charge envelope of the extracted MS spectrum from the major peak in the TIC trace. The bottom row is the deconvoluted mass spectrum resulting from the extracted MS spectrum. The deconvoluted mass of HSA-Peptide Conjugate 1 was 70713.7 Da, which is consistent with the conjugation of one peptide-linker construct. The deconvoluted mass of HSA-Peptide Conjugate 2 was 76167.0 Da, which is consistent with the conjugation of the dimeric peptide-linker construct.

[0320] FIG. 170 shows the SDS-PAGE gel electrophoresis analysis of the HSA-Peptide Conjugates 1 (lane 2) and 2 (lane 3), HSA (lane 4) with the standard MW ladder (lane 1). The slight difference in the migration of the bands results from the conjugation of the monomeric or dimeric peptide-linker construct.

[0321] FIG. 171 shows the frequency of mechanically-evoked action potential firing in mouse saphenous nerve C-fibers following 1.6 μM CyA-[Nle6,Pra17,Glu28]JzTx-V(1-29) (SEQ ID NO:395) or 0.1% BSA as a negative control. Responses to 150 mN mechanical stimuli were significantly reduced 15 min and 25 min post-SEQ ID NO:395 application to the corium (dermis) side of the skin. TTX (1 μM) was applied at the end of the experiment and completely blocked action potential firing.

[0322] FIG. 172 shows the frequency of 150 nM mechanically-evoked action potential firing in mouse saphenous nerve C-fibers following 1.6 μM CyA-[Nle6,Pra17,Glu28]JzTx-V(1-29) (SEQ ID NO:395) or 0.1% BSA as a negative control. TTX (1 μM) was applied at the end of the experiment and completely blocked action potential firing. Responses from individual fibers are plotted showing that some C-fibers are completely blocked whereas other C-fibers are nominally blocked by 1.6 μM CyA-[Nle6,Pra17,Glu28]JzTx-V(1-29) (SEQ ID NO:395).

[0323] FIG. 173 shows the effect of Pra-[Nle6; 5-BrW24; Glu28]JzTx-V(1-29) (Seq ID No: 858) on TTX-sensitive Nav channels in C57 Black 6 mouse DRG neuron. Cell was held at −80 mV and peak inward Nav currents were measured at −10 mV. ‘Control’ trace shows Nav current before Pra-[Nle6; 5-BrW24; Glu28]JzTx-V(1-29) (Seq ID No: 858), ‘30 nM Seq ID No. 858’ trace shows Nav current after Pra-[Nle6; 5-BrW24; Glu28]JzTx-V(1-29) (Seq ID No: 858) addition, and ‘0.5 μM TTX’ trace shows Nav current after TTX. Note that 30 nM Pra-[Nle6; 5-BrW24; Glu28]JzTx-V(1-29) (Seq ID No: 858) blocks most of TTX-sensitive Nav current.

[0324] FIG. 174 shows the time course of increasing concentrations of Pra-[Nle6; 5-BrW24; Glu28]JzTx-V(1-29) (Seq ID No: 858) against TTX-sensitive Nav channels in C57 Black 6 mouse DRG neuron. Peak inward Nav currents were measured at −10 mV every 10 seconds in the presence of increasing concentrations of Pra-[Nle6; 5-BrW24; Glu28]JzTx-V(1-29) (Seq ID No: 858); cell was held at either −120 mV (squares), a voltage where Nav channels are completely non-inactivated, or −80 mV (circles), a voltage that yields approximately 20% inactivation. ‘Ctrl’ indicates Nav current in the absence of Pra-[Nle6; 5-BrW24; Glu28]JzTx-V(1-29) (Seq ID No: 858), ‘0.5 μM TTX’ indicates Nav current in the presence of 0.5 μM TTX, and ‘Wash’ indicates Nav current following removal of Seq ID No. 858 and TTX.

[0325] FIG. 175 shows the dose-response curves of Pra-[Nle6; 5-BrW24; Glu28]JzTx-V(1-29) (Seq ID No: 858) against TTX-sensitive Nav channels in two separate C57 Black 6 mouse DRG neurons. Peak inward Nav currents were measured at −10 mV in the presence of increasing concentrations of Pra-[Nle6; 5-BrW24; Glu28]JzTx-V(1-29) (Seq ID No: 858) and divided by current before the peptide addition (I/I0); cells were held at a voltage that yielded approximately 20% inactivation.

### DETAILED DESCRIPTION OF EMBODIMENTS

[0326] The section headings used herein are for organizational purposes only and are not to be construed as limiting the subject matter described.

### DEFINITIONS

[0327] Unless otherwise defined herein, scientific and technical terms used in connection with the present application shall have the meanings that are commonly understood by those of ordinary skill in the art. Further, unless otherwise required by context, singular terms shall include pluralities and plural terms shall include the singular. Thus, as used in this specification and the appended claims, the singular forms “a”, “an” and “the” include plural referents unless the context clearly indicates otherwise. For example, reference to “a protein” includes a plurality of proteins; reference to “a cell” includes populations of a plurality of cells.

[0328] “Polypeptide” and “protein” are used interchangeably herein and include a molecular chain of two or more amino acids linked covalently through peptide bonds. The terms do not refer to a specific length of the product. Thus, “peptides,” and “oligopeptides,” are included within the definition of polypeptide. The terms include post-translational modifications of the polypeptide, for example, glycosylations, acetylations, biotinylations, 4-pentynoylations, PEGylations, phosphorylations and the like. In addition, protein fragments, analogs, mutated or variant proteins, fusion proteins and the like are included within the meaning of polypeptide. The terms also include molecules in which one or more amino acid analogs or non-canonical or unnatural amino acids are included as can be expressed recombinantly using known protein engineering techniques. In addition, fusion proteins can be derivatized as described herein by well-known organic chemistry techniques.

[0329] A composition of the present invention that includes a peptide or polypeptide of the invention covalently linked, attached, or bound, either directly or indirectly through a linker moiety, to another peptide or polypeptide of the invention or to a half-life extending moiety is a “conjugate” or “conjugated” molecule, whether conjugated by chemical means (e.g., post-translationally or post-synthetically) or by recombinant fusion.

[0330] “Biotin” is a water-soluble B-complex vitamin, i.e., vitamin B7, that is composed of an ureido (tetrahydroimidizalone) ring fused with a tetrahydrothiophene ring (See, Formula I).

[chemical structure]

A valeric acid substituent is attached to one of the carbon atoms of the tetrahydrothiophene ring. In nature, biotin is a coenzyme in the metabolism of fatty acids and leucine, and it plays a role in vivo in gluconeogenesis. Biotin binds very tightly to the tetrameric protein avidin (e.g., Chicken avidin, bacterial streptavidin, and neutravidin), with a dissociation equilibrium constant K_{D} in the order of 10⁻¹⁴ M to 10⁻¹⁶ M, which is one of the strongest known protein-ligand interactions, approaching the covalent bond in strength. (Laitinen et al. Genetically engineered avidins and streptavidins, Cell Mol Life Sci. 63 (24): 2992-30177 (2006)). The biotin-avidin non-covalent interaction is often used in different biotechnological applications. (See, Laitinen et al., Genetically engineered avidins and streptavidins, Cell Mol Life Sci. 63 (24): 2992-30177 (2006)).

[0331] “Biotinylated” means that a substance is covalently conjugated to one or more biotin moieties. Biotinylated peptides useful in practicing the invention can be purchased commercially (e.g., Midwest Bio-Tech Inc.) or can be readily synthesized and biotinylated. Biotinylation of compounds, such as peptides, can be by any known chemical technique. These include primary amine biotinylation, sulfhydryl biotinylation, and carboxyl biotinylation. For example, amine groups on the peptide, which are present as lysine side chain epsilon-amines and N-terminal α-amines, are common targets for primary amine biotinylation. Amine-reactive biotinylation reagents can be divided into two groups based on water solubility.
[0332] 1) N-hydroxysuccinimide (NHS)-esters of biotin have poor solubility in aqueous solutions. For reactions in aqueous solution, they must first be dissolved in an organic solvent, then diluted into the aqueous reaction mixture. The most commonly used organic solvents for this purpose are dimethyl sulfoxide (DMSO) and dimethyl formamide (DMF), which are compatible with most proteins at low concentrations.
[0333] 2) Sulfo-NHS-esters of biotin are more soluble in water, and are dissolved in water just before use because they hydrolyze easily. The water solubility of sulfo-NHS-esters stems from their sulfonate group on the N-hydroxysuccinimide ring and eliminates the need to dissolve the reagent in an organic solvent.
   Chemical reactions of NHS- and sulfo-NHS-esters are essentially the same: an amide bond is formed and NHS or sulfo-NHS become leaving groups. Because the targets for the ester are deprotonated primary amines, the reaction is prevalent above pH 7. Hydrolysis of the NHS-ester is a major competing reaction, and the rate of hydrolysis increases with increasing pH. NHS- and sulfo-NHS-esters have a half-life of several hours at pH 7, but only a few minutes at pH 9. The conditions for conjugating NHS-esters to primary amines of peptides include incubation temperatures in the range 4-37° C., reaction pH values in the range 7-9, and incubation times from a few minutes to about 12 hours. Buffers containing amines (such as Tris or glycine) must be avoided because they compete with the reaction. The HABA dye (2-(4-hydroxyazobenzene) benzoic acid) method can be used to determine the extent of biotinylation. Briefly, HABA dye is bound to avidin and yields a characteristic absorbance. When biotin, in the form of biotinylated protein or other molecule, is introduced, it displaces the dye, resulting in a change in absorbance at 500 nm. The absorbance change is directly proportional to the level of biotin in the sample.

[0334] “4-pentynoylation” of an amino acid residue is typically by coupling 4-pentynoic acid via a standard amide bond reaction via the N-terminal or at a side chain. When appropriate for additional PEGylations, 4-pentynoylation can alternatively employ an alkyne in the copper-catalyzed 1,3-dipolar cycloaddition reaction (the so-called “Click” reaction) to react with the azide in the azido-PEG molecule to link the peptide and the PEG via a triazole.

[0335] An “isolated polypeptide” is a polypeptide molecule that is purified or separated from at least one contaminant polypeptide molecule with which it is ordinarily associated in the natural source of the polypeptide. An isolated polypeptide molecule is other than in the form or setting in which it is found in nature.

[0336] “Toxin peptides” include peptides and polypeptides having the same amino acid sequence of a naturally occurring pharmacologically active peptide or polypeptide that can be isolated from a venom, and also include modified peptide analogs of such naturally occurring molecules. (See, e.g., Kalman et al., ShK-Dap22, a potent Kv1.3-specific immunosuppressive polypeptide, J. Biol. Chem. 273(49):32697-707 (1998); Kem et al., U.S. Pat. No. 6,077,680; Mouhat et al., OsK1 derivatives, WO 2006/002850 A2; Chandy et al., Analogs of SHK toxin and their uses in selective inhibition of Kv1.3 potassium channels, WO 2006/042151; Sullivan et al., Toxin Peptide therapeutic agents, WO 2006/116156 A2, all of which are incorporated herein by reference in their entirety). Snakes, scorpions, spiders, bees, snails and sea anemone are a few examples of organisms that produce venom that can serve as a rich source of small bioactive toxin peptides or “toxins” that potently and selectively target ion channels and receptors. Some examples of toxins that inhibit voltage-gated sodium channels include JzTx-V (SEQ ID NO:2), JzTx-45 (YCQKWMWTCDSERKCCEGYVCELWCKYNL//SEQ ID NO:48), and JzTx-46 (YCQKWMWTCDSERKCCEGYVCELWCKYNM//SEQ ID NO:430), isolated from the venom of tarantula Chilobrachys jingzhao; GpTx-1 (Asp Cys Leu Gly Phe Met Arg Lys Cys Ile Pro Asp Asn Asp Lys Cys Cys Arg Pro Asn Leu Val Cys Ser Arg Thr His Lys Trp Cys Lys Tyr Val Phe-NH₂//SEQ ID NO:532) isolated from the venom of tarantula Grammostola porteri, Huwentoxin-IV (ECLEI FKACN PSNDQ CCKSS KLVCS RKTRW CKYQI-NH₂//SEQ ID NO:528) and Huwentoxin-I (ACKGV FDACT PGKNE CCPNR VCSDK HKWCK WKL//SEQ ID NO:529), isolated from the venom of tarantula Ornithoctonus huwena; KIIIA (CCNCS SKWCR DHSRC C-NH₂//SEQ ID NO:530) isolated from the venom of marine cone snail Conus kinoshitai; ProTxI (Glu Cys Arg Tyr Trp Leu Gly Gly Cys Ser Ala Gly Gln Thr Cys Cys Lys His Leu Val Cys Ser Arg Arg His Gly Trp Cys Val Trp Asp Gly Thr Phe Ser//SEQ ID NO:593) and ProTxII (YCQKW MWTCD SERKC CEGMV CRLWC KKKLW//SEQ ID NO:531) isolated from the venom of tarantula Thrixopelma pruriens. Another example is the alpha toxin OD1 (GVRDAYIADD KNCVYTCASN GYCNTECTKN GAESGYCQWI GRYGNACWCI KLPDEVPIRIPGKCR-NH₂//SEQ ID NO:589), a toxin isolated from the venom of the scorpion Odonthobuthus doriae. Another example of a toxin peptide is OSK1 (also known as OsK1), a toxin peptide isolated from Orthochirus scrobiculosus scorpion venom. (e.g., Mouhat et al., K+ channel types targeted by synthetic OSK1, a toxin from Orthochirus scrobiculosus scorpion venom, Biochem. J. 385:95-104 (2005); Mouhat et al., Pharmacological profiling of Orthochirus scrobiculosus toxin 1 analogs with a trimmed N-terminal domain, Molec. Pharmacol. 69:354-62 (2006); Mouhat et al., OsK1 derivatives, WO 2006/002850 A2). Another example is ShK, isolated from the venom of the sea anemone Stichodactyla helianthus, and its peptide analogs. (E.g., Tudor et al., Ionisation behaviour and solution properties of the potassium-channel blocker ShK toxin, Eur. J. Biochem. 251(1-2):133-41(1998); Pennington et al., Role of disulfide bonds in the structure and potassium channel blocking activity of ShK toxin, Biochem. 38(44): 14549-58 (1999); Kem et al., ShK toxin compositions and methods of use, U.S. Pat. No. 6,077,680; Lebrun et al., Neuropeptides originating in scorpion, U.S. Pat. No. 6,689,749; Beeton et al., Targeting effector memory T cells with a selective peptide inhibitor of Kv1.3 channnels for therapy of autoimmune diseases, Molec. Pharmacol. 67(4):1369-81 (2005); and Sullivan et al., Selective and potent peptide inhibitors of K_{V}1.3, WO 2010/108154 A2).

[0337] The toxin peptides are usually between about 20 and about 80 amino acids in length, contain 2-5 disulfide linkages and form a very compact structure. Toxin peptides (e.g., from the venom of scorpions, sea anemones and cone snails) have been isolated and characterized for their impact on ion channels. Such peptides appear to have evolved from a relatively small number of structural frameworks that are particularly well suited to addressing the critical issues of potency and stability. The majority of scorpion and Conus toxin peptides, for example, contain 10-40 amino acids and up to five disulfide bonds, forming extremely compact and constrained structure (microproteins) often resistant to proteolysis. The conotoxin and scorpion toxin peptides can be divided into a number of superfamilies based on their disulfide connections and peptide folds. The solution structure of many toxin peptides has been determined by NMR spectroscopy, illustrating their compact structure and verifying conservation of family folding patterns. (E.g., Tudor et al., Ionisation behaviour and solution properties of the potassium-channel blocker ShK toxin, Eur. J. Biochem. 251(1-2):133-41(1998); Pennington et al., Role of disulfide bonds in the structure and potassium channel blocking activity of ShK toxin, Biochem. 38(44): 14549-58 (1999); Jaravine et al., Three-dimensional structure of toxin OSK1 from Orthochirus scrobiculosus scorpion venom, Biochem. 36(6):1223-32 (1997); del Rio-Portillo et al.; NMR solution structure of Cn12, a novel peptide from the Mexican scorpion Centruroides noxius with a typical beta-toxin sequence but with alpha-like physiological activity, Eur. J. Biochem. 271(12): 2504-16 (2004); Prochnicka-Chalufour et al., Solution structure of discrepin, a new K+-channel blocking peptide from the alpha-KTx15 subfamily, Biochem. 45(6):1795-1804 (2006)). Other examples are known in the art, or can be found in Sullivan et al., Toxin Peptide Therapeutic Agents, WO06116156 A2 or U.S. Pat. No. 7,833,979; Sullivan et al., Selective and potent peptide inhibitors of K_{V}1.3, WO 2010/108154 A2; Mouhat et al., OsK1 derivatives, WO 2006/002850 A2; Sullivan et al., U.S. patent application Ser. No. 11/978,076 (titled: filed 25 Oct. 2007), Lebrun et al., U.S. Pat. No. 6,689,749, which are each incorporated by reference in their entireties.

[0338] The term “peptide analog” refers to a peptide having a sequence that differs from a peptide sequence existing in nature by at least one amino acid residue substitution, internal addition, or internal deletion of at least one amino acid, and/or amino- or carboxy-terminal end truncations or additions, and/or carboxy-terminal amidation. An “internal deletion” refers to absence of an amino acid from a sequence existing in nature at a position other than the N- or C-terminus. Likewise, an “internal addition” refers to presence of an amino acid in a sequence existing in nature at a position other than the N- or C-terminus.

[0339] Embodiments of the inventive composition of matter includes a toxin peptide analog, or a pharmaceutically acceptable salt thereof “Toxin peptide analogs” contain modifications of a native toxin peptide sequence of interest (e g, amino acid residue substitutions, internal additions or insertions, internal deletions, and/or amino- or carboxy-terminal end truncations, or additions as previously described above) relative to a native toxin peptide sequence of interest, such as JzTx-V (YCQKWMWTCDSKRACCEGLRCKLWCRKII-NH₂//SEQ ID NO:2). Toxin peptide analogs of the present invention are 20 to about 80 amino acid residues long and, in relation to SEQ ID NO:2, have C¹-C⁴, C²-C⁵ and C³-C⁶ disulfide (or diselenide) bonding in which, C¹, C², C³, C⁴, C⁵ and C⁶ represent the order of cysteine (or selenocysteine) residues appearing in the primary sequence of the toxin peptide stated conventionally with the N-terminus of the peptide(s) on the left, with the first and sixth cysteines (or selenocysteines) in the amino acid sequence forming a disulfide bond (or diselenide bond, if SeCys), the second and fourth cysteines (or selenocysteines) forming a disulfide bond (or diselenide bond, if SeCys), and the third and fifth cysteines (or selenocysteines) forming a disulfide bond (or diselenide bond, if SeCys). As described herein, the toxin peptide analogs of the present invention can also have additional amino acid residues at the N-terminal and/or C-terminal ends, in relation to SEQ ID NO:2.

[0340] By “physiologically acceptable salt” of the composition of matter, for example a salt of the toxin peptide analog, is meant any salt or salts that are known or later discovered to be pharmaceutically acceptable. Some non-limiting examples of pharmaceutically acceptable salts are: acetate; trifluoroacetate; hydrohalides, such as hydrochloride and hydrobromide; sulfate; citrate; maleate; tartrate; glycolate; gluconate; succinate; mesylate; besylate; salts of gallic acid esters (gallic acid is also known as 3,4,5 trihydroxybenzoic acid) such as PentaGalloylGlucose (PGG) and epigallocatechin gallate (EGCG), salts of cholesteryl sulfate, pamoate, tannate and oxalate salts.

[0341] The term “fusion protein” indicates that the protein includes polypeptide components derived from more than one parental protein or polypeptide. Typically, a fusion protein is expressed from a fusion gene in which a nucleotide sequence encoding a polypeptide sequence from one protein is appended in frame with, and optionally separated by a linker from, a nucleotide sequence encoding a polypeptide sequence from a different protein. The fusion gene can then be expressed by a recombinant host cell as a single protein.

[0342] The terms “-mimetic peptide,” “peptide mimetic,” and “-agonist peptide” refer to a peptide or protein having biological activity comparable to a naturally occurring protein of interest, for example, but not limited to, a toxin peptide molecule. These terms further include peptides that indirectly mimic the activity of a naturally occurring peptide molecule, such as by potentiating the effects of the naturally occurring molecule.

[0343] The term “-antagonist peptide,” “peptide antagonist,” and “inhibitor peptide” refer to a peptide that blocks or in some way interferes with the biological activity of a receptor of interest, or has biological activity comparable to a known antagonist or inhibitor of a receptor of interest, such as, but not limited to, an ion channel (e.g., Nav1.7 or Nav1.3) or a G-Protein Coupled Receptor (GPCR).

[0344] A “domain” of a protein is any portion of the entire protein, up to and including the complete protein, but typically comprising less than the complete protein. A domain can, but need not, fold independently of the rest of the protein chain and/or be correlated with a particular biological, biochemical, or structural function or location (e.g., a ligand binding domain, or a cytosolic, transmembrane or extracellular domain).

[0345] As used herein “soluble” when in reference to a protein produced by recombinant DNA technology in a host cell is a protein that exists in aqueous solution; if the protein contains a twin-arginine signal amino acid sequence the soluble protein is exported to the periplasmic space in gram negative bacterial hosts, or is secreted into the culture medium by eukaryotic host cells capable of secretion, or by bacterial host possessing the appropriate genes (e.g., the kil gene). Thus, a soluble protein is a protein which is not found in an inclusion body inside the host cell. Alternatively, depending on the context, a soluble protein is a protein which is not found integrated in cellular membranes. In contrast, an insoluble protein is one which exists in denatured form inside cytoplasmic granules (called an inclusion body) in the host cell, or again depending on the context, an insoluble protein is one which is present in cell membranes, including but not limited to, cytoplasmic membranes, mitochondrial membranes, chloroplast membranes, endoplasmic reticulum membranes, etc.

[0346] A distinction is also drawn between proteins which are “soluble” (i.e., dissolved or capable of being dissolved) in an aqueous solution devoid of significant amounts of ionic detergents (e.g., SDS) or denaturants (e.g., urea, guanidine hydrochloride) and proteins which exist as a suspension of insoluble protein molecules dispersed within the solution. A “soluble” protein will not be removed from a solution containing the protein by centrifugation using conditions sufficient to remove cells present in a liquid medium (e.g., centrifugation at 5,000×g for 4-5 minutes). In some embodiments of the inventive composition, the toxin peptide analog is synthesized by the host cell and segregated in an insoluble form within cellular inclusion bodies, which can then be purified from other cellular components in a cell extract with relative ease, and the toxin peptide analog can in turn be solubilized, refolded and/or further purified.

[0347] A distinction is drawn between a “soluble” protein (i.e., a protein which when expressed in a host cell is produced in a soluble form) and a “solubilized” protein. An insoluble recombinant protein found inside an inclusion body or found integrated in a cell membrane may be solubilized (i.e., rendered into a soluble form) by treating purified inclusion bodies or cell membranes with denaturants such as guanidine hydrochloride, urea or sodium dodecyl sulfate (SDS). These denaturants must then be removed from the solubilized protein preparation to allow the recovered protein to renature (refold). Although the inventive compositions can be refolded in active form, not all proteins will refold into an active conformation after solubilization in a denaturant and removal of the denaturant. Many proteins precipitate upon removal of the denaturant. SDS may be used to solubilize inclusion bodies and cell membranes and will maintain the proteins in solution at low concentration. However, dialysis will not always remove all of the SDS (SDS can form micelles which do not dialyze out); therefore, SDS-solubilized inclusion body protein and SDS-solubilized cell membrane protein is soluble but not refolded.

[0348] A “secreted” protein refers to those proteins capable of being directed to the ER, secretory vesicles, or the extracellular space as a result of a secretory signal peptide sequence, as well as those proteins released into the extracellular space without necessarily containing a signal sequence. If the secreted protein is released into the extracellular space, the secreted protein can undergo extracellular processing to produce a “mature” protein. Release into the extracellular space can occur by many mechanisms, including exocytosis and proteolytic cleavage. In some other embodiments of the inventive composition, the toxin peptide analog can be synthesized by the host cell as a secreted protein, which can then be further purified from the extracellular space and/or medium.

[0349] The term “recombinant” indicates that the material (e.g., a nucleic acid or a polypeptide) has been artificially or synthetically (i.e., non-naturally) altered by human intervention. The alteration can be performed on the material within, or removed from, its natural environment or state. For example, a “recombinant nucleic acid” is one that is made by recombining nucleic acids, e.g., during cloning, DNA shuffling or other well known molecular biological procedures. Examples of such molecular biological procedures are found in Maniatis et al., Molecular Cloning. A Laboratory Manual. Cold Spring Harbor Laboratory, Cold Spring Harbor, N.Y. (1982). A “recombinant DNA molecule,” is comprised of segments of DNA joined together by means of such molecular biological techniques. The term “recombinant protein” or “recombinant polypeptide” as used herein refers to a protein molecule which is expressed using a recombinant DNA molecule. A “recombinant host cell” is a cell that contains and/or expresses a recombinant nucleic acid.

[0350] The term “polynucleotide” or “nucleic acid” includes both single-stranded and double-stranded nucleotide polymers containing two or more nucleotide residues. The nucleotide residues comprising the polynucleotide can be ribonucleotides or deoxyribonucleotides or a modified form of either type of nucleotide. Said modifications include base modifications such as bromouridine and inosine derivatives, ribose modifications such as 2′,3′-dideoxyribose, and internucleotide linkage modifications such as phosphorothioate, phosphorodithioate, phosphoroselenoate, phosphorodiselenoate, phosphoroanilothioate, phosphoraniladate and phosphoroamidate.

[0351] The term “oligonucleotide” means a polynucleotide comprising 200 or fewer nucleotide residues. In some embodiments, oligonucleotides are 10 to 60 bases in length. In other embodiments, oligonucleotides are 12, 13, 14, 15, 16, 17, 18, 19, or 20 to 40 nucleotides in length. Oligonucleotides may be single stranded or double stranded, e.g., for use in the construction of a mutant gene. Oligonucleotides may be sense or antisense oligonucleotides. An oligonucleotide can include a label, including an isotopic label (e.g., ¹²⁵I, ¹⁴C, ¹³C, ³⁵S, ³H, ²H, ¹³N, ¹⁵N, ¹⁸O, ¹⁷O, etc.), for ease of quantification or detection, a fluorescent label, a hapten or an antigenic label, for detection assays. Oligonucleotides may be used, for example, as PCR primers, cloning primers or hybridization probes.

[0352] A “polynucleotide sequence” or “nucleotide sequence” or “nucleic acid sequence,” as used interchangeably herein, is the primary sequence of nucleotide residues in a polynucleotide, including of an oligonucleotide, a DNA, and RNA, a nucleic acid, or a character string representing the primary sequence of nucleotide residues, depending on context. From any specified polynucleotide sequence, either the given nucleic acid or the complementary polynucleotide sequence can be determined Included are DNA or RNA of genomic or synthetic origin which may be single- or double-stranded, and represent the sense or antisense strand. Unless specified otherwise, the left-hand end of any single-stranded polynucleotide sequence discussed herein is the 5′ end; the left-hand direction of double-stranded polynucleotide sequences is referred to as the 5′ direction. The direction of 5′ to 3′ addition of nascent RNA transcripts is referred to as the transcription direction; sequence regions on the DNA strand having the same sequence as the RNA transcript that are 5′ to the 5′ end of the RNA transcript are referred to as “upstream sequences;” sequence regions on the DNA strand having the same sequence as the RNA transcript that are 3′ to the 3′ end of the RNA transcript are referred to as “downstream sequences.”

[0353] As used herein, an “isolated nucleic acid molecule” or “isolated nucleic acid sequence” is a nucleic acid molecule that is either (1) identified and separated from at least one contaminant nucleic acid molecule with which it is ordinarily associated in the natural source of the nucleic acid or (2) cloned, amplified, tagged, or otherwise distinguished from background nucleic acids such that the sequence of the nucleic acid of interest can be determined. An isolated nucleic acid molecule is other than in the form or setting in which it is found in nature. However, an isolated nucleic acid molecule includes a nucleic acid molecule contained in cells that ordinarily express a polypeptide (e.g., an oligopeptide or antibody) where, for example, the nucleic acid molecule is in a chromosomal location different from that of natural cells.

[0354] As used herein, the terms “nucleic acid molecule encoding,” “DNA sequence encoding,” and “DNA encoding” refer to the order or sequence of deoxyribonucleotides along a strand of deoxyribonucleic acid. The order of these deoxyribonucleotides determines the order of ribonucleotides along the mRNA chain, and also determines the order of amino acids along the polypeptide (protein) chain. The DNA sequence thus codes for the RNA sequence and for the amino acid sequence.

[0355] The term “gene” is used broadly to refer to any nucleic acid associated with a biological function. Genes typically include coding sequences and/or the regulatory sequences required for expression of such coding sequences. The term “gene” applies to a specific genomic or recombinant sequence, as well as to a cDNA or mRNA encoded by that sequence. A “fusion gene” contains a coding region that encodes a polypeptide with portions from different proteins that are not naturally found together, or not found naturally together in the same sequence as present in the encoded fusion protein (i.e., a chimeric protein). Genes also include non-expressed nucleic acid segments that, for example, form recognition sequences for other proteins. Non-expressed regulatory sequences including transcriptional control elements to which regulatory proteins, such as transcription factors, bind, resulting in transcription of adjacent or nearby sequences.

[0356] “Expression of a gene” or “expression of a nucleic acid” means transcription of DNA into RNA (optionally including modification of the RNA, e.g., splicing), translation of RNA into a polypeptide (possibly including subsequent post-translational modification of the polypeptide), or both transcription and translation, as indicated by the context.

[0357] As used herein the term “coding region” or “coding sequence” when used in reference to a structural gene refers to the nucleotide sequences which encode the amino acids found in the nascent polypeptide as a result of translation of an mRNA molecule. The coding region is bounded, in eukaryotes, on the 5′ side by the nucleotide triplet “ATG” which encodes the initiator methionine and on the 3′ side by one of the three triplets which specify stop codons (i.e., TAA, TAG, TGA).

[0358] The term “control sequence” or “control signal” refers to a polynucleotide sequence that can, in a particular host cell, affect the expression and processing of coding sequences to which it is ligated. The nature of such control sequences may depend upon the host organism. In particular embodiments, control sequences for prokaryotes may include a promoter, a ribosomal binding site, and a transcription termination sequence. Control sequences for eukaryotes may include promoters comprising one or a plurality of recognition sites for transcription factors, transcription enhancer sequences or elements, polyadenylation sites, and transcription termination sequences. Control sequences can include leader sequences and/or fusion partner sequences. Promoters and enhancers consist of short arrays of DNA that interact specifically with cellular proteins involved in transcription (Maniatis, et al., Science 236:1237 (1987)). Promoter and enhancer elements have been isolated from a variety of eukaryotic sources including genes in yeast, insect and mammalian cells and viruses (analogous control elements, i.e., promoters, are also found in prokaryotes). The selection of a particular promoter and enhancer depends on what cell type is to be used to express the protein of interest. Some eukaryotic promoters and enhancers have a broad host range while others are functional in a limited subset of cell types (for review see Voss, et al., Trends Biochem. Sci., 11:287 (1986) and Maniatis, et al., Science 236:1237 (1987)).

[0359] The term “vector” means any molecule or entity (e.g., nucleic acid, plasmid, bacteriophage or virus) used to transfer protein coding information into a host cell.

[0360] The term “expression vector” or “expression construct” as used herein refers to a recombinant DNA molecule containing a desired coding sequence and appropriate nucleic acid control sequences necessary for the expression of the operably linked coding sequence in a particular host cell. An expression vector can include, but is not limited to, sequences that affect or control transcription, translation, and, if introns are present, affect RNA splicing of a coding region operably linked thereto. Nucleic acid sequences necessary for expression in prokaryotes include a promoter, optionally an operator sequence, a ribosome binding site and possibly other sequences. Eukaryotic cells are known to utilize promoters, enhancers, and termination and polyadenylation signals. A secretory signal peptide sequence can also, optionally, be encoded by the expression vector, operably linked to the coding sequence of interest, so that the expressed polypeptide can be secreted by the recombinant host cell, for more facile isolation of the polypeptide of interest from the cell, if desired. Such techniques are well known in the art. (E.g., Goodey, Andrew R.; et al., Peptide and DNA sequences, U.S. Pat. No. 5,302,697; Weiner et al., Compositions and methods for protein secretion, U.S. Pat. No. 6,022,952 and U.S. Pat. No. 6,335,178; Uemura et al., Protein expression vector and utilization thereof, U.S. Pat. No. 7,029,909; Ruben et al., 27 human secreted proteins, US 2003/0104400 A1).

[0361] The terms “in operable combination”, “in operable order” and “operably linked” as used herein refer to the linkage of nucleic acid sequences in such a manner that a nucleic acid molecule capable of directing the transcription of a given gene and/or the synthesis of a desired protein molecule is produced. The term also refers to the linkage of amino acid sequences in such a manner so that a functional protein is produced. For example, a control sequence in a vector that is “operably linked” to a protein coding sequence is ligated thereto so that expression of the protein coding sequence is achieved under conditions compatible with the transcriptional activity of the control sequences.

[0362] The term “host cell” means a cell that has been transformed, or is capable of being transformed, with a nucleic acid and thereby expresses a gene of interest. The term includes the progeny of the parent cell, whether or not the progeny is identical in morphology or in genetic make-up to the original parent cell, so long as the gene of interest is present. Any of a large number of available and well-known host cells may be used in the practice of this invention. The selection of a particular host is dependent upon a number of factors recognized by the art. These include, for example, compatibility with the chosen expression vector, toxicity of the peptides encoded by the DNA molecule, rate of transformation, ease of recovery of the peptides, expression characteristics, bio-safety and costs. A balance of these factors must be struck with the understanding that not all hosts may be equally effective for the expression of a particular DNA sequence. Within these general guidelines, useful microbial host cells in culture include bacteria (such as Escherichia coli sp.), yeast (such as Saccharomyces sp.) and other fungal cells, insect cells, plant cells, mammalian (including human) cells, e.g., CHO cells and HEK-293 cells. Modifications can be made at the DNA level, as well. The peptide-encoding DNA sequence may be changed to codons more compatible with the chosen host cell. For E. coli, optimized codons are known in the art. Codons can be substituted to eliminate restriction sites or to include silent restriction sites, which may aid in processing of the DNA in the selected host cell. Next, the transformed host is cultured and purified. Host cells may be cultured under conventional fermentation conditions so that the desired compounds are expressed. Such fermentation conditions are well known in the art.

[0363] The term “transfection” means the uptake of foreign or exogenous DNA by a cell, and a cell has been “transfected” when the exogenous DNA has been introduced inside the cell membrane. A number of transfection techniques are well known in the art and are disclosed herein. See, e.g., Graham et al., 1973, Virology 52:456; Sambrook et al., 2001, Molecular Cloning: A Laboratory Manual, supra; Davis et al., 1986, Basic Methods in Molecular Biology, Elsevier; Chu et al., 1981, Gene 13:197. Such techniques can be used to introduce one or more exogenous DNA moieties into suitable host cells.

[0364] The term “transformation” refers to a change in a cell's genetic characteristics, and a cell has been transformed when it has been modified to contain new DNA or RNA. For example, a cell is transformed where it is genetically modified from its native state by introducing new genetic material via transfection, transduction, or other techniques. Following transfection or transduction, the transforming DNA may recombine with that of the cell by physically integrating into a chromosome of the cell, or may be maintained transiently as an episomal element without being replicated, or may replicate independently as a plasmid. A cell is considered to have been “stably transformed” when the transforming DNA is replicated with the division of the cell.

[0365] The term “transgene” refers to an isolated nucleotide sequence, originating in a different species from the host, that may be inserted into one or more cells of a mammal or mammalian embryo. The transgene optionally may be operably linked to other genetic elements (such as a promoter, poly A sequence and the like) that may serve to modulate, either directly, or indirectly in conjunction with the cellular machinery, the transcription and/or expression of the transgene. Alternatively or additionally, the transgene may be linked to nucleotide sequences that aid in integration of the transgene into the chromosomal DNA of the mammalian cell or embryo nucleus (as for example, in homologous recombination). The transgene may be comprised of a nucleotide sequence that is either homologous or heterologous to a particular nucleotide sequence in the mammal's endogenous genetic material, or is a hybrid sequence (i.e. one or more portions of the transgene are homologous, and one or more portions are heterologous to the mammal's genetic material). The transgene nucleotide sequence may encode a polypeptide or a variant of a polypeptide, found endogenously in the mammal, it may encode a polypeptide not naturally occurring in the mammal (i.e. an exogenous polypeptide), or it may encode a hybrid of endogenous and exogenous polypeptides. Where the transgene is operably linked to a promoter, the promoter may be homologous or heterologous to the mammal and/or to the transgene. Alternatively, the promoter may be a hybrid of endogenous and exogenous promoter elements (enhancers, silencers, suppressors, and the like).

[0366] Peptides.

[0367] Recombinant DNA- and/or RNA-mediated protein expression and protein engineering techniques, or any other methods of preparing peptides, are applicable to the making of the inventive polypeptides, e.g., toxin peptide analogs and fusion protein conjugates thereof (e.g., fusion proteins containing a toxin peptide analog and an immunoglobulin Fc domain, transthyretin, human serum albumin, or a lipid or albumin binding peptide). For example, the peptides can be made in transformed host cells. Briefly, a recombinant DNA molecule, or construct, coding for the peptide is prepared. Methods of preparing such DNA molecules are well known in the art. For instance, sequences encoding the peptides can be excised from DNA using suitable restriction enzymes. Any of a large number of available and well-known host cells may be used in the practice of this invention. The selection of a particular host is dependent upon a number of factors recognized by the art. These include, for example, compatibility with the chosen expression vector, toxicity of the peptides encoded by the DNA molecule, rate of transformation, ease of recovery of the peptides, expression characteristics, bio-safety and costs. A balance of these factors must be struck with the understanding that not all hosts may be equally effective for the expression of a particular DNA sequence. Within these general guidelines, useful microbial host cells in culture include bacteria (such as Escherichia coli sp.), yeast (such as Saccharomyces sp.) and other fungal cells, insect cells, plant cells, mammalian (including human) cells, e.g., CHO cells and HEK293 cells. Modifications can be made at the DNA level, as well. The peptide-encoding DNA sequence may be changed to codons more compatible with the chosen host cell. For E. coli, optimized codons are known in the art. Codons can be substituted to eliminate restriction sites or to include silent restriction sites, which may aid in processing of the DNA in the selected host cell. Next, the transformed host is cultured and purified. Host cells may be cultured under conventional fermentation conditions so that the desired compounds are expressed. Such fermentation conditions are well known in the art. In addition, the DNA optionally further encodes, 5′ to the coding region of a fusion protein, a signal peptide sequence (e.g., a secretory signal peptide) operably linked to the expressed toxin peptide analog. For further examples of appropriate recombinant methods and exemplary DNA constructs useful for recombinant expression of the inventive compositions by mammalian cells, including dimeric Fc fusion proteins (“peptibodies”) or chimeric immunoglobulin (light chain+heavy chain)-Fc heterotrimers (“hemibodies”), conjugated to pharmacologically active toxin peptide analogs of the invention, see, e.g., Sullivan et al., Toxin Peptide Therapeutic Agents, US2007/0071764 and Sullivan et al., Toxin Peptide Therapeutic Agents, PCT/US2007/022831, published as WO 2008/088422, which are both incorporated herein by reference in their entireties.

[0368] Peptide compositions of the present invention can also be made by synthetic methods. Solid phase synthesis is the preferred technique of making individual peptides since it is the most cost-effective method of making small peptides. For example, well known solid phase synthesis techniques include the use of protecting groups, linkers, and solid phase supports, as well as specific protection and deprotection reaction conditions, linker cleavage conditions, use of scavengers, and other aspects of solid phase peptide synthesis. Suitable techniques are well known in the art. (E.g., Merrifield (1973), Chem. Polypeptides, pp. 335-61 (Katsoyannis and Panayotis eds.); Merrifield (1963), J. Am. Chem. Soc. 85: 2149; Davis et al. (1985), Biochem. Intl. 10: 394-414; Stewart and Young (1969), Solid Phase Peptide Synthesis; U.S. Pat. No. 3,941,763; Finn et al. (1976), The Proteins (3rd ed.) 2: 105-253; and Erickson et al. (1976), The Proteins (3rd ed.) 2: 257-527; “Protecting Groups in Organic Synthesis,” 3rd Edition, T. W. Greene and P. G. M. Wuts, Eds., John Wiley & Sons, Inc., 1999; NovaBiochem Catalog, 2000; “Synthetic Peptides, A User's Guide,” G. A. Grant, Ed., W.H. Freeman & Company, New York, N.Y., 1992; “Advanced Chemtech Handbook of Combinatorial & Solid Phase Organic Chemistry,” W. D. Bennet, J. W. Christensen, L. K. Hamaker, M. L. Peterson, M. R. Rhodes, and H. H. Saneii, Eds., Advanced Chemtech, 1998; “Principles of Peptide Synthesis, 2nd ed.,” M. Bodanszky, Ed., Springer-Verlag, 1993; “The Practice of Peptide Synthesis, 2nd ed.,” M. Bodanszky and A. Bodanszky, Eds., Springer-Verlag, 1994; “Protecting Groups,” P. J. Kocienski, Ed., Georg Thieme Verlag, Stuttgart, Germany, 1994; “Fmoc Solid Phase Peptide Synthesis, A Practical Approach,” W. C. Chan and P. D. White, Eds., Oxford Press, 2000, G. B. Fields et al., Synthetic Peptides: A User's Guide, 1990, 77-183). For further examples of synthetic and purification methods known in the art, which are applicable to making the inventive compositions of matter, see, e.g., Sullivan et al., Toxin Peptide Therapeutic Agents, US2007/0071764 and Sullivan et al., Toxin Peptide Therapeutic Agents, PCT/US2007/022831, published as WO 2008/088422 A2, which are both incorporated herein by reference in their entireties.

[0369] In further describing the toxin peptide analogs herein, a one-letter abbreviation system is frequently applied to designate the identities of the twenty “canonical” amino acid residues generally incorporated into naturally occurring peptides and proteins (Table 2). Such one-letter abbreviations are entirely interchangeable in meaning with three-letter abbreviations, or non-abbreviated amino acid names. Within the one-letter abbreviation system used herein, an upper case letter indicates a L-amino acid, and a lower case letter indicates a D-amino acid. For example, the abbreviation “R” designates L-arginine and the abbreviation “r” designates D-arginine.

TABLE 2
One-letter abbreviations for the canonical amino acids.
Three-letter abbreviations are in parentheses.

| | |
|---|---|
| Alanine (Ala) | A |
| Glutamine (Gln) | Q |
| Leucine (Leu) | L |
| Serine (Ser) | S |
| Arginine (Arg) | R |
| Glutamic Acid (Glu) | E |
| Lysine (Lys) | K |
| Threonine (Thr) | T |
| Asparagine (Asn) | N |
| Glycine (Gly) | G |
| Methionine (Met) | M |
| Tryptophan (Trp) | W |
| Aspartic Acid (Asp) | D |
| Histidine (His) | H |
| Phenylalanine (Phe) | F |
| Tyrosine (Tyr) | Y |
| Cysteine (Cys) | C |
| Isoleucine (Ile) | I |
| Proline (Pro) | P |
| Valine (Val) | V |

[0370] An amino acid substitution in an amino acid sequence is typically designated herein with a one-letter abbreviation for the amino acid residue in a particular position, followed by the numerical amino acid position relative to a native sequence of interest, which is then followed by the one-letter symbol for the amino acid residue substituted in. For example, “T30D” symbolizes a substitution of a threonine residue by an aspartate residue at amino acid position 30, relative to the native sequence of interest.

[0371] Non-canonical amino acid residues can be incorporated into a peptide within the scope of the invention by employing known techniques of protein engineering that use recombinantly expressing cells. (See, e.g., Link et al., Non-canonical amino acids in protein engineering, Current Opinion in Biotechnology, 14(6):603-609 (2003)). The term “non-canonical amino acid residue” refers to amino acid residues in D- or L-form that are not among the 20 canonical amino acids generally incorporated into naturally occurring proteins, for example, β-amino acids, homoamino acids, cyclic amino acids and amino acids with derivatized side chains. Examples include (in the L-form or D-form) β-alanine, β-aminopropionic acid, piperidinic acid, aminocaprioic acid, aminoheptanoic acid, aminopimelic acid, desmosine, diaminopimelic acid, N^{α}-ethylglycine, N^{α}-ethylaspargine, hydroxylysine, allo-hydroxylysine, isodesmosine, allo-isoleucine, ω-methylarginine, N^{α}-methylglycine, N^{α}-methylisoleucine, N^{α}-methylvaline, γ-carboxyglutamate, ε-N,N,N-trimethyllysine, ε-N-acetyllysine, O-phosphoserine, N^{α}-acetylserine, N^{α}-formylmethionine, 3-methylhistidine, 5-hydroxylysine, and other similar amino acids, and those listed in Table 3 below, and derivatized forms of any of these as described herein. Table 3 contains some exemplary non-canonical amino acid residues that are useful in accordance with the present invention and associated abbreviations as typically used herein, although the skilled practitioner will understand that different abbreviations and nomenclatures may be applicable to the same substance and appear interchangeably herein. Some amino acid sequences, as recited herein may include “{H}-” at the N-terminal, which represents an N-terminal amino group, and/or may include “-{Free Acid}” at the C-terminal, which represents a C-terminal carboxy group.

TABLE 3
Useful non-canonical amino acids for amino acid addition, insertion, or substitution
into peptide sequences in accordance with the present invention. In the event an abbreviation
listed in Table 3 differs from another abbreviation for the same substance disclosed
elsewhere herein, both abbreviations are understood to be applicable. The amino acids
listed in Table 3 can be in the L-form or D-form, unless otherwise noted.

| Amino Acid | Abbreviation(s) |
|---|---|
| Acetamidomethyl | Acm |
| Acetylarginine | acetylarg |
| α-aminoadipic acid | Aad |
| aminobutyric acid | Abu |
| 2-aminobutyric acid | 2-Abu |
| 6-aminohexanoic acid | Ahx; εAhx |
| L-azidohomoalanine | Aha |
| 3-amino-6-hydroxy-2-piperidone | Ahp |
| 2-aminoindane-2-carboxylic acid | Aic |
| α-amino-isobutyric acid | Aib |
| L-allylglycine | AllylG |
| 3-amino-2-naphthoic acid | Anc |
| 2-aminotetraline-2-carboxylic acid | Atc |
| Aminophenylalanine | Aminophe; Amino-Phe |
| 4-amino-phenylalanine (also known as para- | 4AmP; 4-AminoF; 4- |
| aminophenylalanine) | Amino-Phe |
| 4-amidino-phenylalanine | 4AmPhe |
| 2-amino-2-(1-carbamimidoylpiperidin-4-yl)acetic acid | 4AmPig |
| ω-N-methylarginine | R(Me) |
| Arg ψ(CH₂NH) -reduced amide bond | rArg |
| 3-(1,2,3-triazol-4-yl)Alanine | Atz |
| Atz((S)-2-amino-3-(1-(5,21-dioxo-1-((3aS,4S,6aR)-2- | [Atz](ClickBiotin) |
| oxohexahydro-1H-thieno[3,4-d]imidazol-4-yl)-9,12,15,18- | |
| tetraoxa-6,22-diazaoctacosan-28-yl)-1H-1,2,3-triazol-4- | |
| yl)propanoic acid | |
| (S)-15-(4-(2-amino-2-carboxyethyl)-1H-1,2,3-triazol-1- | [Atz](palmitate) |
| yl)pentadecanoic acid | |
| (3S,6S,9S,12S,15S,18S)-6-((1H-indol-3-yl)methyl)-3-(((2S,3S)- | Atz(pentanoyl-GGGGS- |
| 1-(((3S,6S,12R,17R,20S,25aS)-6-((1H-indol-3-yl)methyl)-12- | SA21) |
| (((2R,5S,8S,11S,14S)-11-((1H-indol-3-yl)methyl)-1-amino-8-(2- | |
| carboxyethyl)-2,5-bis(carboxymethyl)-16-methyl-1,4,7,10,13- | |
| pentaoxo-3,6,9,12-tetraazaheptadecan-14-yl)carbamoyl)-3-(3- | |
| guanidinopropyl)-20-isobutyl-1,4,7,10,18,21- | |
| hexaoxodocosahydro-1H-pyrrolo[2,1- | |
| p][1,2,5,8,11,14,17,20]dithiahexaazacyclotricosin-17-yl)amino)- | |
| 3-methyl-1-oxopentan-2-yl)carbamoyl)-36-(4-((S)-2-amino-2- | |
| carboxyethyl)-1H-1,2,3-triazol-1-yl)-9-((S)-sec-butyl)-15-(3- | |
| guanidinopropyl)-18-(hydroxymethyl)-12-isobutyl- | |
| 5,8,11,14,17,20,23,26,29,32-decaoxo- | |
| 4,7,10,13,16,19,22,25,28,31-decaazahexatriacontan-1-oic acid | |
| (S)-2-amino-3-(1-(1-bromo-2-oxo-6,9,12-trioxa-3-azatetradecan- | Atz(PEG3- |
| 14-yl)-1H-1,2,3-triazol-4-yl)propanoic acid | bromoacetamide) |
| (S)-2-amino-3-(1-(32-amino-3,6,9,12,15,18,21,24,27,30- | Atz(NPEG9) |
| decaoxadotriacontyl)-1H-1,2,3-triazol-4-yl)propanoic acid | |
| (S)-2-amino-3-(1-(1-amino-3,6,9,12,15,18,21,24,27,30- | Atz(NPEG10)or |
| decaoxatritriacontan-33-yl)-1H-1,2,3-triazol-4-yl)propanoic acid | Atz(PEG10)or |
| | Pra(NPEG9) |
| 3-(1-(O-(aminoethyl)-O′-(ethylene)-decaethyleneglycol)-1,2,3- | Atz(amino-PEG10) |
| triazol-4-yl)Alanine | |
| 3-(1-(O-(aminoethyl)-O′-(ethylene)-ethyleneglycol450avg)- | Atz(20 kDa PEG) |
| 1,2,3-triazol-4-yl)Alanine | |
| (S)-2-amino-3-(1-(2-oxo-6,9,12,15,18,21,24,27,30,33,36- | Atz(PEG11- |
| undecaoxa-3-azaoctatriacontan-38-yl)-1H-1,2,3-triazol-4- | (acetamidomethyl) |
| yl)propanoic acid | |
| (S)-2-amino-3-(1-(4-oxo-1-phenyl- | Atz(PEG11- |
| 8,11,14,17,20,23,26,29,32,35,38-undecaoxa-2-thia-5- | benzylthioacetamide) |
| azatetracontan-40-yl)-1H-1,2,3-triazol-4-yl)propanoic acid | |
| (S)-2-amino-3-(1-(1-hydroxy-5-oxo- | Atz(PEG11-((2- |
| 9,12,15,18,21,24,27,30,33,36,39-undecaoxa-3-thia-6- | hydroxyethyl)thio)acetamide) |
| azahentetracontan-41-yl)-1H-1,2,3-triazol-4-yl)propanoic acid | |
| (S)-2-amino-3-(1-(1-bromo-2-oxo- | Atz(PEG11- |
| 6,9,12,15,18,21,24,27,30,33,36-undecaoxa-3-azaoctatriacontan- | bromoacetamide) |
| 38-yl)-1H-1,2,3-triazol-4-yl)propanoic acid | |
| (2S,2′S)-3,3′-(1,1′-(1,1′-(5-((2-(benzylthio)acetamido)methyl)- | Bis-[Atz(PEG23)]- |
| 1,3-phenylene)bis(1-oxo- | benzylthioacetamide |
| 5,8,11,14,17,20,23,26,29,32,35,38,41,44,47,50,53,56,59,62,65,68,71- | |
| tricosaoxa-2-azatriheptacontane-73,1-diyl))bis(1H-1,2,3- | |
| triazole-4,1-diyl))bis(2-aminopropanoic acid) | |
| (S)-2-amino-6-((S)-2-amino-3-(1-(32-amino- | KAtzNP10 or |
| 3,6,9,12,15,18,21,24,27,30-decaoxadotriacontyl)-1H-1,2,3- | KAtzNPEG10 |
| triazol-4-yl)propanamido)hexanoic acid | |
| (2S,25S)-2,25-diamino-1-(1-(32-amino- | KAP4P10 |
| 3,6,9,12,15,18,21,24,27,30-decaoxadotriacontyl)-1H-1,2,3- | |
| triazol-4-yl)-3,19-dioxo-7,10,13,16-tetraoxa-4,20- | |
| diazahexacosan-26-oic acid | |
| (S)-2-amino-6-(3-(1-(1-bromo-2-oxo- | K(ethyl-triazole-PEG11- |
| 6,9,12,15,18,21,24,27,30,33,36-undecaoxa-3-azaoctatriacontan- | bromoacetamide) |
| 38-yl)-1H-1,2,3-triazol-4-yl)propanamido)hexanoic acid | |
| L-azidolysine | AzK |
| β-alanine | bA |
| β-homoarginine | bhArg |
| β-homolysine | bhomoK |
| β-homoglutamine | BhGln or hGln |
| β-homo Tic | BhTic |
| β-homophenylalanine (or homophenylalanine) | BhPhe or hPhe or |
| | homoPhe |
| bishomopropargylglycine | BhPra |
| β-homoproline | BhPro |
| β-homotryptophan | BhTrp |
| 4,4′-biphenylalanine; 4-phenyl-phenylalanine; or | Bip; 4Bip |
| biphenylalanine | |
| β,β-diphenyl-alanine | BiPhA |
| β-phenylalanine | BPhe |
| p-carboxyl-phenylalanine | Cpa |
| 4-chloro-L-phenylalanine | 4-Cl—F |
| (2S,5S)-14-bromo-2-ethyl-5-(hydroxymethyl)-4,7,10,13- | Bromoacetyl-GGS[Aha]- |
| tetraoxo-3,6,9,12-tetraazatetradecan-1-oic acid | Amide |
| Citrulline | Cit |
| Cyclohexylalanine | Cha |
| Cyclohexylglycine | Chg |
| Cyclopentylglycine | Cpg |
| L-cyano-β-alanine | CyA |
| 4-tert-butyl-L-phenylalanine | 4tBu—F or 4-tBu—F |
| 4-benzoyl-L-phenylalanine | 4-Bz-F |
| 2-chloro-L-phenylalanine | 2-Cl—F |
| 4-trifluoromethyl-L-phenylalanine | 4CF3—F |
| 4-fluoro-L-phenylalanine | 4-F—F |
| 4-methyl-L-phenylalanine | 4-Me—F |
| 2-amino-3-guanidinopropanoic acid | 3G-Dpr |
| α,γ-diaminobutyric acid | Dab |
| 2,4-diaminobutyric acid | Dbu |
| diaminopropionic acid | Dap |
| 3,4-dichloro-L-phenylalanine | DiCl—F |
| 3,4-dimethoxy-L-phenylalanine | DiMeO—F |
| α,β-diaminopropionoic acid (or 2,3-diaminopropionic acid | Dpr |
| 3,3-diphenylalanine | Dip |
| ethynylphenylalanine | EPA |
| L-butynylglycine or (S)-2-amino-4-hexynoic acid | BtnG |
| 4-guanidino phenylalanine | Guf |
| 4-guanidino proline | 4GuaPr |
| Homoarginine | hArg; hR |
| Homocitrulline | hCit |
| Homoglutamine | hQ |
| Homoleucine | hLeu; hL |
| Homolysine | hLys; hK; homoLys |
| homopropargylglycine | hPra |
| 4-hydroxyproline (or hydroxyproline) | Hyp |
| 2-indanylglycine (or indanylglycine) | IgI |
| indoline-2-carboxylic acid | Idc |
| Iodotyrosine | I-Tyr |
| (S)-2-amino-6-((S)-2-aminopent-4-ynamido)hexanoic acid | Lys(Pra) or K(Pra) |
| (S)-2-amino-6-(6-((S)-2-aminopent-4- | Lys(Pra-Ahx) |
| ynamido)hexanamido)hexanoic acid | |
| (3S,6S,9S,12S,15S,18S)-6-((1H-indol-3-yl)methyl)-3-(((2S,3S)- | Lys(Atz(pentanoyl- |
| 1-(((3S,6S,12R,17R,20S,25aS)-6-((1H-indol-3-yl)methyl)-12- | GGGGS-SA21)) |
| (((2R,5S,8S,11S,14S)-11-((1H-indol-3-yl)methyl)-1-amino-8-(2- | |
| carboxyethyl)-2,5-bis(carboxymethyl)-16-methyl-1,4,7,10,13- | |
| pentaoxo-3,6,9,12-tetraazaheptadecan-14-yl)carbamoyl)-3-(3- | |
| guanidinopropyl)-20-isobutyl-1,4,7,10,18,21- | |
| hexaoxodocosahydro-1H-pyrrolo[2,1- | |
| p][1,2,5,8,11,14,17,20]dithiahexaazacyclotricosin-17-yl)amino)- | |
| 3-methyl-1-oxopentan-2-yl)carbamoyl)-36-(4-((S)-2-amino-3- | |
| (((S)-5-amino-5-carboxypentyl)amino)-3-oxopropyl)-1H-1,2,3- | |
| triazol-1-yl)-9-((S)-sec-butyl)-15-(3-guanidinopropyl)-18- | |
| (hydroxymethyl)-12-isobutyl-5,8,11,14,17,20,23,26,29,32- | |
| decaoxo-4,7,10,13,16,19,22,25,28,31-decaazahexatriacontan-1- | |
| oic acid | |
| (4S,51S)-4,51-diamino-5,45-dioxo- | Lys(Pra-NPEG11) |
| 9,12,15,18,21,24,27,30,33,36,39,42-dodecaoxa-6,46- | |
| diazadopentacont-1-yn-52-oic acid | |
| (4S,27S)-4,27-diamino-5,21-dioxo-9,12,15,18-tetraoxa-6,22- | Lys(Pra-NPEG3) or |
| diazaoctacos-1-yn-28-oic acid | KPPG3 |
| Lys ψ(CH₂NH)-reduced amide bond | rLys |
| (S)-6-((S)-2-acetamidopent-4-ynamido)-2-aminohexanoic acid | K(Ac-Pra) |
| N-ε-biotinyl-L-lysine | K(Biotin) |
| (S)-2,2′,2″-(10-(2-((5-amino-5-carboxypentyl)amino)-2- | K(DOTA) |
| oxoethyl)-1,4,7,10-tetraazacyclododecane-1,4,7-triyl)triacetic | |
| acid | |
| (S)-2-amino-6-(pent-4-ynamido)hexanoic acid | K(4-Pen) |
| methionine oxide | Met[O] |
| methionine sulfone | Met[O]₂ |
| N^{α}-methylarginine | NMeR |
| Nα-[(CH₂)₃NHCH(NH)NH₂] substituted glycine | N-Arg |
| N^{α}-methylcitrulline | NMeCit |
| N^{α}-methylglutamine | NMeQ |
| N^{α}-methylhomocitrulline | N^{α}-MeHoCit |
| N^{α}-methylhomolysine | NMeHoK |
| N^{α}-methylleucine | N^{α}-MeL; NMeL; |
| | NMeLeu; NMe-Leu |
| N^{α}-methyllysine | NMe-Lys |
| Nε-methyl-lysine | N-eMe-K |
| Nε-ethyl-lysine | N-eEt-K |
| Nε-isopropyl-lysine | N-eIPr-K |
| N^{α}-methylnorleucine | NMeNle; NMe-Nle |
| N^{α}-methylornithine | N^{α}-MeOrn; NMeOrn |
| N^{α}-methylphenylalanine | NMe-Phe |
| 1′N-methyltryptophan | 1′NMeW |
| 4-methyl-phenylalanine | MePhe |
| α-methylphenyalanine | AMeF |
| N^{α}-methylthreonine | NMe-Thr; NMeThr |
| N^{α}-methylvaline | NMeVal; NMe-Val |
| Nε-(O-(aminoethyl)-O′-(2-propanoyl)-undecaethyleneglycol)- | K(NPeg11) |
| Lysine | |
| Nε-(O-(aminoethyl)-O′-(2-propanoyl)-(ethyleneglycol)27-Lysine | K(NPeg27) |
| 3-(1-naphthyl)alanine | 1-Nal; 1Nal |
| 3-(2-naphthyl)alanine | 2-Nal; 2Nal |
| nipecotic acid | Nip |
| Nitrophenylalanine | nitrophe |
| norleucine | Nle |
| norvaline | Nva or Nvl |
| O-methyltyrosine | Ome-Tyr |
| (S)-octylglycine | OctylG |
| octahydroindole-2-carboxylic acid | Oic |
| Ornithine | Orn |
| Orn ψ(CH2NH)-reduced amide bond | rOrn |
| pyroglutamic acid | pGlu; PE; pE |
| L-phosphoserine | pS |
| 4-piperidinylalanine | 4PipA |
| 4-pyridinylalanine | 4Pal |
| 3 -pyridinylalanine | 3Pal |
| 2-pyridinylalanine | 2Pal |
| para-iodophenylalanine (or 4-iodophenylalanine) | pI-Phe |
| Phenylglycine | Phg |
| Propargylglycine | Pra |
| pipecolic acid | Pip |
| 4-amino-1-piperidine-4-carboxylic acid | 4Pip |
| Sarcosine | Sar |
| 1,2,3,4-tetrahydroisoquinoline | Tic |
| 1,2,3,4-tetrahydroisoquinoline-1-carboxylic acid | Tiq |
| 1,2,3,4-tetrahydroisoquinoline-7-hydroxy-3-carboxylic acid | Hydroxyl-Tic |
| 1,2,3,4-tetrahydronorharman-3-carboxylic acid | Tpi |
| thiazolidine-4-carboxylic acid | Thz |
| 3-thienylalanine | Thi |
| (S)-tert-butylglycine | Tle |
| symmetrical N′-ω-dimethyl arginine | SDMA |
| N-ε-dimethyl lysine | K(Me2) |
| 4-carboxyphenylalanine | 4CO2—F |
| 5-Bromotryptophan | 5-BrW |
| 6-Bromotryptophan | 6-BrW |
| 7-Bromotryptophan | 7-BrW |
| 5-Chlorotryptophan | 5-ClW |
| 6-Methyltryptophan | 6-MeW |
| 2-Bromohomophenylalanine | 2-BrhF |
| 2-Chlorohomophenylalanine | 2-ClhF |
| 2-Fluorohomophenylalanine | 2-FhF |
| 2-Methylhomophenylalanine | 2-MehF |
| 2-Methoxyhomophenylalanine | 2-MeOhF |
| 3-Bromohomophenylalanine | 3-BrhF |
| 3-Chlorohomophenylalanine | 3-ClhF |
| 3-Fluorohomophenylalanine | 3-FhF |
| 3-Methylhomophenylalanine | 3-MehF |
| 3-Methoxyhomophenylalanine | 3-MeOhF |
| 4-Bromohomophenylalanine | 4-BrhF |
| 4-Chlorohomophenylalanine | 4-ClhF |
| 4-Fluorohomophenylalanine | 4-FhF |
| 4-Methylphenylalanine | 4-Me—F |
| 4-Methylhomophenylalanine | 4-MehF |
| 4-Methoxyhomophenylalanine | 4-MeOhF |

[0372] Nomenclature and Symbolism for Amino Acids and Peptides by the UPAC-IUB Joint Commission on Biochemical Nomenclature (JCBN) have been published in the following documents: Biochem. J., 1984, 219, 345-373; Eur. J. Biochem., 1984, 138, 9-37; 1985, 152, 1; 1993, 213, 2; Internat. J. Pept. Prot. Res., 1984, 24, following p 84; J. Biol. Chem., 1985, 260, 14-42; Pure Appl. Chem., 1984, 56, 595-624; Amino Acids and Peptides, 1985, 16, 387-410; Biochemical Nomenclature and Related Documents, 2nd edition, Portland Press, 1992, pages 39-69.

[0373] The one or more useful modifications to peptide domains of the inventive compositions can include amino acid additions or insertions, amino acid deletions, peptide truncations, amino acid substitutions, and/or chemical derivatization of amino acid residues, accomplished by known chemical techniques. For example, the thusly modified amino acid sequence includes at least one amino acid residue inserted or substituted therein, relative to the amino acid sequence of the native sequence of interest, in which the inserted or substituted amino acid residue has a side chain comprising a nucleophilic or electrophilic reactive functional group by which the peptide is covalently conjugated to a linker and/or half-life extending moiety. In accordance with the invention, useful examples of such a nucleophilic or electrophilic reactive functional group include, but are not limited to, a thiol, a primary amine, a seleno, a hydrazide, an aldehyde, a carboxylic acid, a ketone, an aminooxy, a masked (protected) aldehyde, or a masked (protected) keto functional group. Examples of amino acid residues having a side chain comprising a nucleophilic reactive functional group include, but are not limited to, a lysine residue, a homolysine, an α,β-diaminopropionic acid residue, an α,γ-diaminobutyric acid residue, an ornithine residue, a cysteine, a homocysteine, a glutamic acid residue, an aspartic acid residue, or a selenocysteine (“SeCys” or “SeC”) residue.

[0374] Amino acid residues are commonly categorized according to different chemical and/or physical characteristics. The term “acidic amino acid residue” refers to amino acid residues in D- or L-form having side chains comprising acidic groups. Exemplary acidic residues include aspartic acid and glutamic acid residues. The term “alkyl amino acid residue” refers to amino acid residues in D- or L-form having C₁-6alkyl side chains which may be linear, branched, or cyclized, including to the amino acid amine as in proline, wherein the C₁₋₆alkyl is substituted by 0, 1, 2 or 3 substituents selected from C₁₋₄haloalkyl, halo, cyano, nitro, —C(═O)R^{b}, —C(═O)OR^{a}, —C(═O)NR^{a}R^{a}, —C(═NR^{a})NR^{a}R^{a}, —NR^{a}C(═NR^{a})NR^{a}R^{a}, —OR^{a}, —OC(═O)R^{b},—OC(═O)NR^{a}R^{a}, —OC₂₋₆alkylNR^{a}R^{a}, —OC₂₋₆alkylOR^{a}, —SR^{a}, —S(═O)R^{b}, —S(═O)₂R^{b}, —S(═O)₂NR^{a}R^{a}, —NR^{a}R^{a}, —N(R^{a})C(═O)R^{b}, —N(R^{a})C(═O)OR^{b}, —N(R^{a})C(═O)NR^{a}R^{a}, N(R^{a})C(═NR^{a})NR^{a}R^{a}, —N(R^{a})S(═O)₂R^{b}, —N(R^{a})S(═O)₂NR^{a}R^{a}, —NR^{a}C₂₋₆alkylNR^{a}R^{a} and —NR^{a}C₂₋₆alkylOR^{a}; wherein R^{a} is independently, at each instance, H or R^{b}; and R^{b} is independently, at each instance C₁₋₆alkyl substituted by 0, 1, 2 or 3 substituents selected from halo, C₁₋₄alk, C₁₋₃haloalk, —OC₁₋₄alk, —NH₂, —NHC₁₋₄alk, and —N(C₁₋₄alk)C₁₋₄alk; or any protonated form thereof, including alanine, valine, leucine, isoleucine, proline, serine, threonine, lysine, arginine, histidine, aspartate, glutamate, asparagine, glutamine, cysteine, methionine, hydroxyproline, cyclohexylalanine, norleucine, norvaline, 2-aminobutyric acid, but which residues do not contain an aryl or aromatic group. The term “aromatic amino acid residue” refers to amino acid residues in D- or L-form having side chains comprising aromatic groups. Exemplary aromatic residues include tryptophan, tyrosine, 3-(1-naphthyl)alanine, histidine, or phenylalanine residues. The term “basic amino acid residue” refers to amino acid residues in D- or L-form having side chains comprising basic groups. Exemplary basic amino acid residues include histidine, lysine, homolysine, ornithine, arginine, N-methyl-arginine, ω-aminoarginine, ω-methyl-arginine, 1-methyl-histidine, 3-methyl-histidine, and homoarginine (hR) residues. The term “hydrophilic amino acid residue” refers to amino acid residues in D- or L-form having side chains comprising polar groups. Exemplary hydrophilic residues include cysteine, serine, threonine, histidine, lysine, asparagine, aspartate, glutamate, glutamine, and citrulline (Cit) residues. The terms “lipophilic amino acid residue” refers to amino acid residues in D- or L-form having sidechains comprising uncharged, aliphatic or aromatic groups. Exemplary lipophilic sidechains include phenylalanine, isoleucine, leucine, methionine, valine, tryptophan, and tyrosine. Alanine (A) is amphiphilic—it is capable of acting as a hydrophilic, or lipophilic (i.e., hydrophobic), residue. Alanine, therefore, is included within the definition of both “lipophilic” (i.e., “hydrophobic”) residue and “hydrophilic” residue. The term “nonfunctional” or “neutral” amino acid residue refers to amino acid residues in D- or L-form having side chains that lack acidic, basic, or aromatic groups. Exemplary neutral amino acid residues include methionine, glycine, alanine, valine, isoleucine, leucine, and norleucine (Nle) residues.

[0375] Additional useful embodiments of toxin peptide analogs can result from conservative modifications of the amino acid sequences of the toxin polypeptides disclosed herein. Conservative modifications will produce half-life extending moiety-conjugated peptides having functional, physical, and chemical characteristics similar to those of the conjugated (e.g., PEG-conjugated) peptide from which such modifications are made. Such conservatively modified forms of the conjugated toxin peptide analogs disclosed herein are also contemplated as being an embodiment of the present invention.

[0376] In contrast, substantial modifications in the functional and/or chemical characteristics of peptides may be accomplished by selecting substitutions in the amino acid sequence that differ significantly in their effect on maintaining (a) the structure of the molecular backbone in the region of the substitution, for example, as an α-helical conformation, (b) the charge or hydrophobicity of the molecule at the target site, or (c) the size of the molecule.

[0377] For example, a “conservative amino acid substitution” may involve a substitution of a native amino acid residue with a nonnative residue such that there is little or no effect on the polarity or charge of the amino acid residue at that position. Furthermore, any native residue in the polypeptide may also be substituted with alanine, as has been previously described for “alanine scanning mutagenesis” (see, for example, MacLennan et al., Acta Physiol. Scand. Suppl., 643:55-67 (1998); Sasaki et al., 1998, Adv. Biophys. 35:1-24 (1998), which discuss alanine scanning mutagenesis).

[0378] In some useful embodiments of the compositions of the invention, the amino acid sequence of the toxin peptide is modified in one or more ways relative to a native toxin peptide sequence of interest, such as, but not limited to, a native JzTx-V sequence (SEQ ID NO:2), a peptide analog of JzTx-V, or any other toxin peptides having amino acid sequences as set forth in Table 5, or elsewhere herein. The one or more useful modifications can include amino acid additions or insertions, amino acid deletions, peptide truncations, amino acid substitutions, and/or chemical derivatization of amino acid residues, accomplished by known chemical techniques. Such modifications can be, for example, for the purpose of enhanced potency, selectivity, and/or proteolytic stability, or the like. Those skilled in the art are aware of techniques for designing peptide analogs with such enhanced properties, such as alanine scanning, rational design based on alignment mediated mutagenesis using known toxin peptide sequences and/or molecular modeling.

[0379] The term “protease” is synonymous with “peptidase”. Proteases comprise two groups of enzymes: the endopeptidases which cleave peptide bonds at points within the protein, and the exopeptidases, which remove one or more amino acids from either N- or C-terminus respectively. The term “proteinase” is also used as a synonym for endopeptidase. The four mechanistic classes of proteinases are: serine proteinases, cysteine proteinases, aspartic proteinases, and metallo-proteinases. In addition to these four mechanistic classes, there is a section of the enzyme nomenclature which is allocated for proteases of unidentified catalytic mechanism. This indicates that the catalytic mechanism has not been identified.

[0380] Cleavage subsite nomenclature is commonly adopted from a scheme created by Schechter and Berger (Schechter I. & Berger A., On the size of the active site in proteases. I. Papain, Biochemical and Biophysical Research Communication, 27:157 (1967); Schechter I. & Berger A., On the active site of proteases. 3. Mapping the active site of papain; specific inhibitor peptides of papain, Biochemical and Biophysical Research Communication, 32:898 (1968)). According to this model, amino acid residues in a substrate undergoing cleavage are designated P1, P2, P3, P4 etc. in the N-terminal direction from the cleaved bond. Likewise, the residues in the C-terminal direction are designated P1′, P2′, P3′, P4′, etc.

[0381] The skilled artisan is aware of a variety of tools for identifying protease binding or protease cleavage sites of interest. For example, the PeptideCutter software tool is available through the ExPASy (Expert Protein Analysis System) proteomics server of the Swiss Institute of Bioinformatics (SIB; www.expasy.org/tools/peptidecutter). PeptideCutter searches a protein sequence from the SWISS-PROT and/or TrEMBL databases or a user-entered protein sequence for protease cleavage sites. Single proteases and chemicals, a selection or the whole list of proteases and chemicals can be used. Different forms of output of the results are available: tables of cleavage sites either grouped alphabetically according to enzyme names or sequentially according to the amino acid number. A third option for output is a map of cleavage sites. The sequence and the cleavage sites mapped onto it are grouped in blocks, the size of which can be chosen by the user. Other tools are also known for determining protease cleavage sites. (E.g., Turk, B. et al., Determination of protease cleavage site motifs using mixture-based oriented peptide libraries, Nature Biotechnology, 19:661-667 (2001); Barrett A. et al., Handbook of proteolytic enzymes, Academic Press (1998)).

[0382] The serine proteinases include the chymotrypsin family, which includes mammalian protease enzymes such as chymotrypsin, trypsin or elastase or kallikrein. The serine proteinases exhibit different substrate specificities, which are related to amino acid substitutions in the various enzyme subsites interacting with the substrate residues. Some enzymes have an extended interaction site with the substrate whereas others have a specificity restricted to the P1 substrate residue.

[0383] Trypsin preferentially cleaves at R or K in position P1. A statistical study carried out by Keil (1992) described the negative influences of residues surrounding the Arg- and Lys-bonds (i.e. the positions P2 and P1′, respectively) during trypsin cleavage. (Keil, B., Specificity of proteolysis, Springer-Verlag Berlin-Heidelberg-NewYork, 335 (1992)). A proline residue in position P1′ normally exerts a strong negative influence on trypsin cleavage. Similarly, the positioning of R and K in P1′ results in an inhibition, as well as negatively charged residues in positions P2 and P1′.

[0384] Chymotrypsin preferentially cleaves at a W, Y or F in position P1 (high specificity) and to a lesser extent at L, M or H residue in position P1. (Keil, 1992). Exceptions to these rules are the following: When W is found in position P1, the cleavage is blocked when M or P are found in position P1′ at the same time. Furthermore, a proline residue in position P1′ nearly fully blocks the cleavage independent of the amino acids found in position P1. When an M residue is found in position P1, the cleavage is blocked by the presence of a Y residue in position P 1′. Finally, when H is located in position P1, the presence of a D, M or W residue also blocks the cleavage.

[0385] Membrane metallo-endopeptidase (NEP; neutral endopeptidase, kidney-brush-border neutral proteinase, enkephalinase, EC 3.4.24.11) cleaves peptides at the amino side of hydrophobic amino acid residues. (Connelly, J C et al., Neutral Endopeptidase 24.11 in Human Neutrophils: Cleavage of Chemotactic Peptide, PNAS, 82(24):8737-8741 (1985)).

[0386] Thrombin preferentially cleaves at an R residue in position P1. (Keil, 1992). The natural substrate of thrombin is fibrinogen. Optimum cleavage sites are when an R residue is in position P1 and Gly is in position P2 and position Pr. Likewise, when hydrophobic amino acid residues are found in position P4 and position P3, a proline residue in position P2, an R residue in position P1, and non-acidic amino acid residues in position P1′ and position P2′. A very important residue for its natural substrate fibrinogen is a D residue in P10.

[0387] Caspases are a family of cysteine proteases bearing an active site with a conserved amino acid sequence and which cleave peptides specifically following D residues. (Earnshaw W C et al., Mammalian caspases: Structure, activation, substrates, and functions during apoptosis, Annual Review of Biochemistry, 68:383-424 (1999)).

[0388] The Arg-C proteinase preferentially cleaves at an R residue in position P1. The cleavage behavior seems to be only moderately affected by residues in position P1′. (Keil, 1992). The Asp-N endopeptidase cleaves specifically bonds with a D residue in position P F. (Keil, 1992).

[0389] The foregoing is merely exemplary and by no means an exhaustive treatment of knowledge available to the skilled artisan concerning protease binding and/or cleavage sites that the skilled artisan may be interested in eliminating in practicing the invention.

[0390] Desired amino acid substitutions (whether conservative or non-conservative) can be determined by those skilled in the art at the time such substitutions are desired. For example, amino acid substitutions can be used to identify important residues of the peptide sequence, or to increase or decrease the affinity of the peptide or vehicle-conjugated peptide molecules described herein.

[0391] Naturally occurring residues may be divided into classes based on common side chain properties:

[0392] 1) hydrophobic: norleucine (Nor or Nle), Met, Ala, Val, Leu, Ile;

[0393] 2) neutral hydrophilic: Cys, Ser, Thr, Asn, Gln;

[0394] 3) acidic: Asp, Glu;

[0395] 4) basic: His, Lys, Arg;

[0396] 5) residues that influence chain orientation: Gly, Pro; and

[0397] 6) aromatic: Trp, Tyr, Phe.

[0398] Conservative amino acid substitutions may involve exchange of a member of one of these classes with another member of the same class. Conservative amino acid substitutions may encompass non-naturally occurring amino acid residues, which are typically incorporated by chemical peptide synthesis rather than by synthesis in biological systems. These include peptidomimetics and other reversed or inverted forms of amino acid moieties.

[0399] Non-conservative substitutions may involve the exchange of a member of one of these classes for a member from another class. Such substituted residues may be introduced into regions of the toxin peptide analog.

[0400] In making such changes, according to certain embodiments, the hydropathic index of amino acids may be considered. Each amino acid has been assigned a hydropathic index on the basis of its hydrophobicity and charge characteristics. They are: isoleucine (+4.5); valine (+4.2); leucine (+3.8); phenylalanine (+2.8); cysteine/cystine (+2.5); methionine (+1.9); alanine (+1.8); glycine (−0.4); threonine (−0.7); serine (−0.8); tryptophan (−0.9); tyrosine (−1.3); proline (−1.6); histidine (−3.2); glutamate (−3.5); glutamine (−3.5); aspartate (−3.5); asparagine (−3.5); lysine (−3.9); and arginine (−4.5).

[0401] The importance of the hydropathic amino acid index in conferring interactive biological function on a protein is understood in the art (see, for example, Kyte et al., 1982, J. Mol. Biol. 157:105-131). It is known that certain amino acids may be substituted for other amino acids having a similar hydropathic index or score and still retain a similar biological activity. In making changes based upon the hydropathic index, in certain embodiments, the substitution of amino acids whose hydropathic indices are within ±2 is included. In certain embodiments, those that are within ±1 are included, and in certain embodiments, those within ±0.5 are included.

[0402] It is also understood in the art that the substitution of like amino acids can be made effectively on the basis of hydrophilicity, particularly where the biologically functional protein or peptide thereby created is intended for use in immunological embodiments, as disclosed herein. In certain embodiments, the greatest local average hydrophilicity of a protein, as governed by the hydrophilicity of its adjacent amino acids, correlates with its immunogenicity and antigenicity, i.e., with a biological property of the protein.

[0403] The following hydrophilicity values have been assigned to these amino acid residues: arginine (+3.0); lysine (+3.0); aspartate (+3.0±1); glutamate (+3.0±1); serine (+0.3); asparagine (+0.2); glutamine (+0.2); glycine (0); threonine (−0.4); proline (−0.5±1); alanine (−0.5); histidine (−0.5); cysteine (−1.0); methionine (−1.3); valine (−1.5); leucine (−1.8); isoleucine (−1.8); tyrosine (−2.3); phenylalanine (−2.5) and tryptophan (−3.4). In making changes based upon similar hydrophilicity values, in certain embodiments, the substitution of amino acids whose hydrophilicity values are within ±2 is included, in certain embodiments, those that are within ±1 are included, and in certain embodiments, those within ±0.5 are included. One may also identify epitopes from primary amino acid sequences on the basis of hydrophilicity. These regions are also referred to as “epitopic core regions.”

[0404] Examples of conservative substitutions include the substitution of one non-polar (hydrophobic) amino acid residue such as isoleucine, valine, leucine norleucine, alanine, or methionine for another, the substitution of one polar (hydrophilic) amino acid residue for another such as between arginine and lysine, between glutamine and asparagine, between glycine and serine, the substitution of one basic amino acid residue such as lysine, arginine or histidine for another, or the substitution of one acidic residue, such as aspartic acid or glutamic acid for another. The phrase “conservative amino acid substitution” also includes the use of a chemically derivatized residue in place of a non-derivatized residue, provided that such polypeptide displays the requisite bioactivity. Other exemplary amino acid substitutions that can be useful in accordance with the present invention are set forth in Table 4 below.

TABLE 4
Some Useful Amino Acid Substitutions.

| Original | Exemplary |
|---|---|
| Residues | Substitutions |
| Ala | Val, Leu, Ile, Gly |
| Arg | Lys, Gln, Asn, His |
| Asn | Gln |
| Asp | Glu |
| Cys | Ser, Ala |
| Gln | Asn |
| Glu | Asp |
| Gly | Pro, Ala |
| His | Asn, Gln, Lys, Arg |
| Ile | Leu, Val, Met, Ala, |
| | Phe, Norleucine |
| Leu | Norleucine, Ile, |
| | Val, Met, Ala, Phe |
| Lys | Arg, 1,4-Diamino- |
| | butyric Acid, Gln, |
| | Asn, His |
| Met | Leu, Phe, Ile |
| Phe | Leu, Val, Ile, Ala, |
| | Tyr |
| Pro | Ala |
| Ser | Thr, Ala, Cys |
| Thr | Ser |
| Trp | Tyr, Phe |
| Tyr | Trp, Phe, Thr, Ser |
| Val | Ile, Met, Leu, Phe, |
| | Ala, Norleucine |

[0405] By way of illustration, some embodiments of the present invention are directed to a composition of matter comprising an isolated polypeptide comprising the amino acid sequence of the formula:

[0406] Xₐₐ¹Xₐₐ²Xₐₐ³Xₐₐ⁴Xₐₐ⁵Xₐₐ⁶Xₐₐ⁷Xₐₐ⁸Xₐₐ⁹Xₐₐ¹⁰Xₐₐ¹¹Aspₐₐ¹²Xₐₐ¹³Xₐₐ¹⁴ Xₐₐ¹⁵Xₐₐ¹⁶Xₐₐ¹⁷Xₐₐ¹⁸Xₐₐ¹⁹Xₐₐ²⁰Leuₐₐ²¹Xₐₐ²²Xₐₐ²³Xₐₐ²⁴Xₐₐ²⁵Xₐₐ²⁶Xₐₐ²⁷Xₐₐ²⁸Xₐₐ²⁹Xₐₐ³⁰Xₐₐ³¹Xₐₐ³²Xₐₐ³³Xₐₐ³⁴//SEQ ID NO:590

[0407] or a pharmaceutically acceptable salt thereof,

[0408] wherein:

[0409] Xₐₐ¹Xₐₐ² is absent; or Xₐₐ¹ is any amino acid residue (e.g., but not limited to, Pra, Aha, Abu, Nva, Nle, Sar, hLeu, hPhe, D-Leu, D-Phe, D-Ala, bAla, AllylG, CyA, or Atz residue or any canonical amino acid residue) and Xₐₐ² is any amino acid residue; or Xₐₐ¹ is absent and Xₐₐ² is any amino acid residue; or Xₐₐ¹ is absent and Xₐₐ² is absent. (For example, Xₐₐ¹ is absent; or Xₐₐ¹ is any amino acid residue; and Xₐₐ² is any hydrophobic or acidic amino acid residue, or a Pra, hPra, bhPra, ethynylphenylalanine (EPA), (S)-2-amino-4-hexynoic acid, Aha, Abu, Nva, Nle, Sar, hLeu, hPhe, D-Leu, D-Phe, D-Ala, bAla, AllylG, CyA, or Atz residue, or any canonical amino acid residue);

[0410] Xₐₐ³ is any amino acid residue;

[0411] Xₐₐ⁴ is Cys, if Xₐₐ¹⁸ is Cys; or Xₐₐ⁴ is SeCys, if Xₐₐ¹⁸ is SeCys;

[0412] Xₐₐ⁵ is any neutral hydrophilic or basic amino acid residue;

[0413] Xₐₐ⁶ is any basic (e.g., histidine, lysine, citrulline, homolysine, ornithine, arginine, N-methyl-arginine, ω-aminoarginine, ω-methyl-arginine, 1-methyl-histidine, 3-methyl-histidine, or homoarginine) or a neutral hydrophilic amino acid residue;

[0414] Xₐₐ⁷ is a Trp, 5-bromoTrp, 6-bromoTrp, 5-chloroTrp, 6-chloroTrp, 1-Nal, 2-Nal, thioTrp, BhPhe, 2-BrhF, 2-C1hF, 2-FhF, 2-MehF, 2-MeOhF, 3-BrhF, 3-ClhF, 3-FhF, 3-MehF, 3-MeOhF, 4-BrhF, 4-C1hF, 4-FhF, 4-Me-F, 4-MehF, 4-MeOhF residue;

[0415] Xₐₐ⁸ is a Met, Nle, Nva, Leu, Ile, Val, or Phe residue;

[0416] Xₐₐ⁹ is a Trp, 5-bromoTrp, 6-bromoTrp, 5-chloroTrp, 6-chloroTrp, 1-Nal, 2-Nal, or thioTrp residue;

[0417] Xₐₐ¹⁰ is a basic or neutral hydrophilic amino acid residue, or an Ala residue;

[0418] Xₐₐ¹¹ is Cys if Xₐₐ²³ is Cys; or Xₐₐ¹¹ is SeCys if Xₐₐ²³ is SeCys;

[0419] Xₐₐ¹³ is any amino acid residue;

[0420] Xₐₐ¹⁴ is a basic or acidic residue or an Ala residue;

[0421] Xₐₐ¹⁵ is an Arg or Cit residue;

[0422] Xₐₐ¹⁶ is any amino acid residue;

[0423] Xₐₐ¹⁷ is a Cys if Xₐₐ²⁷ is Cys; or Xₐₐ¹⁷ is a SeCys if Xₐₐ²⁷ is SeCys;

[0424] Xₐₐ¹⁸ is a Cys or SeCys;

[0425] Xₐₐ¹⁹ is any amino acid residue;

[0426] Xₐₐ²⁰ is a Gly, Asp or Ala residue;

[0427] Xₐₐ²² is an acidic, basic, or neutral hydrophilic amino acid residue, or Ala or Val residue;

[0428] Xₐₐ²³ is a Cys or SeCys residue;

[0429] Xₐₐ²⁴ is a basic or neutral hydrophilic amino acid or Ala residue;

[0430] Xₐₐ²⁵ is an aliphatic hydrophobic residue;

[0431] Xₐₐ²⁶ is a Trp, 5-bromoTrp, 6-bromoTrp, 5-chloroTrp, 6-chloroTrp, 7BrW, 1-Nal, 2-Nal, thioTrp, 5-phenylTrp, 5-iPrTrp, 5-ethylTrp, or 5-MeTrp residue;

[0432] Xₐₐ²⁷ is a Cys or SeCys residue;

[0433] Xₐₐ²⁸ is a basic (e.g., Cit, histidine, lysine, citrulline, homolysine, ornithine, arginine, N-methyl-arginine, ω-aminoarginine, ω-methyl-arginine, 1-methyl-histidine, 3-methyl-histidine, or homoarginine) or neutral hydrophilic amino acid residue;

[0434] Xₐₐ²⁹ is a basic amino acid residue, or a Tyr or Leu residue;

[0435] Xₐₐ³⁰ is an Ile, Trp, Tyr, 5-bromoTrp, 6-bromoTrp, 5-chloroTrp, 6-chloroTrp, 1-Nal, 2-Nal, thioTrp, 1-Nal, or 2-Nal residue, if Xₐₐ²² is an acidic amino acid residue (e.g., Glu, Asp, phosphoserine, phosphotyrosine, or gamma-carboxyglutamic acid residue); or

[0436] Xₐₐ³⁰ is an acidic amino acid residue or a Pro residue, if Xₐₐ²² is a basic or neutral hydrophilic amino acid residue or an Ala or Val residue (for example, if Xₐₐ²² is selected from histidine, lysine, citrulline, homolysine, ornithine, arginine, N-methyl-arginine, w-aminoarginine, ω-methyl-arginine, 1-methyl-histidine, 3-methyl-histidine, homoarginine, Ala or Val residues, then Xₐₐ³⁰ can be selected from Glu, Asp, phosphoserine, phosphotyrosine, and gamma-carboxyglutamic acid residues or a Pro residue);

[0437] Xₐₐ³¹ is an Ile, Trp, Phe, BhPhe, Cha, Tyr, 5-bromoTrp, 6-bromoTrp, 5-chloroTrp, 6-chloroTrp, 1-Nal, 2-Nal, thioTrp, or 4-tBuF residue;

[0438] each of Xₐₐ³², Xₐₐ³³, and Xₐₐ³⁴ is independently absent or is independently a hydrophobic or acidic amino acid residue, or a Ser or Gly residue;

[0439] and wherein:

[0440] if Xₐₐ⁴ and Xₐₐ¹⁸ are both Cys residues, there is a disulfide bond between residue Xₐₐ⁴ and residue Xₐₐ¹⁸; or if Xₐₐ⁴ and Xₐₐ¹⁸ are both SeCys residues, there is a diselenide bond between residue Xₐₐ⁴ and residue Xₐₐ¹⁸;

[0441] if Xₐₐ¹¹ and Xₐₐ²³ are both Cys residues, there is a disulfide bond between residue Xₐₐ¹¹ and residue Xₐₐ²³; or if Xₐₐ¹¹ and Xₐₐ²³ are both SeCys residues, there is a diselenide bond between residue Xₐₐ¹¹ and residue Xₐₐ²³;

[0442] if Xₐₐ¹⁷ and Xₐₐ²⁷ are both Cys residues, there is a disulfide bond between residue Xₐₐ¹⁷ and residue Xₐₐ²⁷; or if Xₐₐ¹⁷ and Xₐₐ²⁷ are both SeCys residues, there is a diselenide bond between residue Xₐₐ¹⁷ and residue Xₐₐ²⁷;

[0443] the amino-terminal residue is optionally acetylated, biotinylated, or 4-pentynoylated, or PEGylated; and

[0444] the carboxy-terminal residue is optionally amidated.

[0445] Particularly useful embodiments include those in which one or more (i.e., one, two, or three) of Xₐₐ¹⁴, Xₐₐ¹⁶, or Xₐₐ²² of SEQ ID NO:590 is an acidic amino acid residue (e.g., a Glu, Asp, phosphoserine, phosphotyrosine, or gamma-carboxyglutamic acid residue), such as combinations of Glu at both Xₐₐ¹⁴ and Xₐₐ¹⁶ of SEQ ID NO:590.

[0446] By way of further illustration, some embodiments of the present invention are directed to a composition of matter comprising an isolated polypeptide comprising the amino acid sequence of the formula: Xₐₐ¹Xₐₐ²Xₐₐ³Xₐₐ⁴Xₐₐ⁵Xₐₐ⁶Xₐₐ⁷Xₐₐ⁸Xₐₐ⁹Xₐₐ¹⁰Xₐₐ¹¹Aspₐₐ¹²Xₐₐ¹³Xₐₐ¹⁴Argₐₐ¹⁵Xₐₐ¹⁶Xₐₐ¹⁷Xₐₐ¹⁸Xₐₐ¹⁹Xₐₐ²⁰Leuₐₐ²¹Xₐₐ²²Xₐₐ²³Xₐₐ²⁴Leuₐₐ²⁵Xₐₐ²⁶Xₐₐ²⁷Xₐₐ²⁸Xₐₐ²⁹Xₐₐ³⁰Xₐₐ³¹Xₐₐ³²Xₐₐ³³Xₐₐ³⁴//SEQ ID NO:516

or a pharmaceutically acceptable salt thereof,
wherein:

[0447] Xₐₐ¹Xₐₐ² is absent; or Xₐₐ¹ is any amino acid residue and Xₐₐ² is any amino acid residue; or Xₐₐ¹ is absent and Xₐₐ² is any amino acid residue; or Xₐₐ¹ is absent and Xₐₐ² is absent (e.g., if present, Xₐₐ¹ or Xₐₐ² can be selected from Ala, Asp, Cys, Glu, Phe, Gly, His, Ile, Lys, Leu, Met, Asn, Pro, Gln, Arg, Ser, Thr, Val, Trp, Tyr, thiaproline, phosphoserine, phosphotyrosine, or gamma-carboxyglutamic acid, homolysine, ornithine, Dab, Dap, N-methyl-arginine, ω-aminoarginine, ω-methyl-arginine, 1-methyl-histidine, 3-methyl-histidine, homoarginine, N-methyl-lysine, N-ε-methyl lysine, Dab, norleucine, norvaline, 1-Nal, 2-Nal, cyclohexylglycine (Chg), cyclohexylalanine (Cha), 4-phenyl-phenylalanine (Bip), Pra, Aha, AzK, Abu, Nva, Nle Sar, hLeu, hPhe, D-Leu, D-Phe, D-Ala, bAla, AllylG, CyA, and Atz residues);

[0448] Xₐₐ³ is any amino acid residue (e.g., Xₐₐ³ can be selected from Ala, Asp, Cys, Glu, Phe, Gly, His, Ile, Lys, Leu, Met, Asn, Pro, Gln, Arg, Ser, Thr, Val, Trp, Tyr, thiaproline, phosphoserine, phosphotyrosine, or gamma-carboxyglutamic acid, homolysine, ornithine, N-methyl-arginine, ω-aminoarginine, ω-methyl-arginine, 1-methyl-histidine, 3-methyl-histidine, homoarginine, N-methyl-lysine, N-s-methyl lysine, Dab, Dap, norleucine, norvaline, 1-Nal, 2-Nal, cyclohexylglycine (Chg), cyclohexylalanine (Cha), and 4-phenyl-phenylalanine (Bip), Pra, Aha, AzK, Abu, Nva, Nle Sar, hLeu, hPhe, D-Leu, D-Phe, D-Ala, bAla, AllylG, CyA, and Atz residues);

[0449] Xₐₐ⁴ is Cys, if Xₐₐ¹⁸ is Cys; or Xₐₐ⁴ is SeCys, if Xₐₐ¹⁸ is SeCys;

[0450] Xₐₐ⁵ is any neutral hydrophilic (e.g., Xₐₐ⁵ is a Gln, Asn, Ser, Thr, or Cit residue) or basic (e.g., Xₐₐ⁵ is a histidine, lysine, homolysine, ornithine, Dab, Dap, arginine, N-methyl-arginine, ω-aminoarginine, ω-methyl-arginine, 1-methyl-histidine, 3-methyl-histidine, or homoarginine residue) amino acid residue;

[0451] Xₐₐ⁶ is any basic amino acid residue (e.g., Xₐₐ⁶ is a histidine, lysine, homolysine, ornithine, Dab, Dap, arginine, N-methyl-arginine, ω-aminoarginine, ω-methyl-arginine, 1-methyl-histidine, 3-methyl-histidine, or homoarginine residue);

[0452] Xₐₐ⁷ is a Trp, 5-bromoTrp, 6-bromoTrp, 5-chloroTrp, 6-chloroTrp, 1-Nal, 2-Nal, or thioTrp residue;

[0453] Xₐₐ⁸ is a Met, Nle, Nva, Leu, Ile, Val, or Phe residue;

[0454] Xₐₐ⁹ is a Trp, 5-bromoTrp, 6-bromoTrp, 5-chloroTrp, 6-chloroTrp, 1-Nal, 2-Nal, or thioTrp residue;

[0455] Xₐₐ¹⁰ is a basic (e.g., Xₐₐ¹⁰ is a histidine, lysine, homolysine, ornithine, Dab, Dap, arginine, N-methyl-arginine, ω-aminoarginine, ω-methyl-arginine, 1-methyl-histidine, 3-methyl-histidine, or homoarginine residue) or neutral hydrophilic (e.g., Xₐₐ¹⁰ is a Gln, Asn, Ser, Thr, or Cit residue) amino acid residue, or an Ala residue;

[0456] Xₐₐ¹¹ is Cys if Xₐₐ²³ is Cys; or Xₐₐ¹¹ is SeCys if Xₐₐ²³ is SeCys;

[0457] Xₐₐ¹³ is any amino acid residue except a hydrophobic residue (e.g., Xₐₐ¹³ can be selected from Asp, Glu, His, Lys, Asn, Pro, Gln, Arg, Ser, Thr, phosphoserine, phosphotyrosine, or gamma-carboxyglutamic acid, homolysine, ornithine, N-methyl-arginine, ω-aminoarginine, ω-methyl-arginine, 1-methyl-histidine, 3-methyl-histidine, homoarginine, N-methyl-lysine, N-δ-methyl lysine, Dab, Dap, norleucine, norvaline, Pra, Aha, AzK, Abu, Nva, Nle Sar, hLeu, hPhe, D-Leu, D-Phe, D-Ala, bAla, AllylG, CyA, and Atz residues);

[0458] Xₐₐ¹⁴ is a basic residue (e.g., Xₐₐ¹⁴ is a histidine, lysine, homolysine, ornithine, Dab, Dap, arginine, N-methyl-arginine, ω-aminoarginine, ω-methyl-arginine, 1-methyl-histidine, 3-methyl-histidine, or homoarginine residue) or an Ala residue;

[0459] Xₐₐ¹⁶ is any amino acid residue (e.g., Xₐₐ¹⁶ can be selected from Ala, Asp, Cys, Glu, Phe, Gly, His, Ile, Lys, Leu, Met, Asn, Pro, Gln, Arg, Ser, Thr, Val, Trp, Tyr, thiaproline, phosphoserine, phosphotyrosine, or gamma-carboxyglutamic acid, homolysine, ornithine, Dab, Dap, N-methyl-arginine, ω-aminoarginine, ω-methyl-arginine, 1-methyl-histidine, 3-methyl-histidine, homoarginine, N-methyl-lysine, N-ε-methyl lysine, Dab, norleucine, norvaline, 1-Nal, 2-Nal, cyclohexylglycine (Chg), cyclohexylalanine (Cha), 4-phenyl-phenylalanine (Bip), Pra, Aha, AzK, Abu, Nva, Nle Sar, hLeu, hPhe, D-Leu, D-Phe, D-Ala, bAla, AllylG, CyA, and Atz residues);

[0460] Xₐₐ¹⁷ is a Cys if Xₐₐ²⁷ is Cys; or Xₐₐ¹⁷ is a SeCys if Xₐₐ²⁷ is SeCys;

[0461] Xₐₐ¹⁸ is a Cys or SeCys;

[0462] Xₐₐ¹⁹ is any amino acid residue (e.g., Xₐₐ¹⁹ can be selected from Ala, Asp, Glu, Phe, Gly, His, Ile, Lys, Leu, Met, Asn, Pro, Gln, Arg, Ser, Thr, Val, Trp, Tyr, thiaproline, phosphoserine, phosphotyrosine, or gamma-carboxyglutamic acid, homolysine, ornithine, Dab, Dap, N-methyl-arginine, ω-aminoarginine, ω-methyl-arginine, 1-methyl-histidine, 3-methyl-histidine, homoarginine, N-methyl-lysine, N-ε-methyl lysine, Dab, norleucine, norvaline, 1-Nal, 2-Nal, cyclohexylglycine (Chg), cyclohexylalanine (Cha), 4-phenyl-phenylalanine (Bip), Pra, Aha, AzK, Abu, Nva, Nle Sar, hLeu, hPhe, D-Leu, D-Phe, D-Ala, bAla, AllylG, CyA, and Atz residues);

[0463] Xₐₐ²⁰ is a Gly or Ala residue;

[0464] Xₐₐ²² is an acidic (e.g., Xₐₐ²² is a Glu, Asp, phosphoserine, phosphotyrosine, or gamma-carboxyglutamic acid residue), basic amino acid residue (e.g., Xₐₐ²² is a histidine, lysine, homolysine, ornithine, Dab, Dap, arginine, N-methyl-arginine, w-aminoarginine, ω-methyl-arginine, 1-methyl-histidine, 3-methyl-histidine, or homoarginine residue), or Ala residue;

[0465] Xₐₐ²³ is a Cys or SeCys residue;

[0466] Xₐₐ²⁴ is a basic amino acid (e.g., Xₐₐ²⁴ is a histidine, lysine, homolysine, ornithine, Dab, Dap, arginine, N-methyl-arginine, ω-aminoarginine, ω-methyl-arginine, 1-methyl-histidine, 3-methyl-histidine, or homoarginine residue) or Ala residue;

[0467] Xₐₐ²⁶ is a Trp, 5-bromoTrp, 6-bromoTrp, 5-chloroTrp, 6-chloroTrp, 1-Nal, 2-Nal, or thioTrp residue;

[0468] Xₐₐ²⁷ is a Cys or SeCys residue;

[0469] Xₐₐ²⁸ is a basic amino acid residue (e.g., Xₐₐ²⁸ is a histidine, lysine, homolysine, ornithine, Dab, Dap, arginine, N-methyl-arginine, ω-aminoarginine, ω-methyl-arginine, 1-methyl-histidine, 3-methyl-histidine, or homoarginine residue);

[0470] Xₐₐ²⁹ is a basic amino acid residue (e.g., Xₐₐ²⁹ is a histidine, lysine, homolysine, ornithine, Dab, Dap, arginine, N-methyl-arginine, ω-aminoarginine, ω-methyl-arginine, 1-methyl-histidine, 3-methyl-histidine, or homoarginine residue);

[0471] Xₐₐ³⁰ is an Ile, Trp, Tyr, 5-bromoTrp, 6-bromoTrp, 5-chloroTrp, 6-chloroTrp, 1-Nal, 2-Nal, thioTrp, 1-Nal, or 2-Nal residue, if Xₐₐ²² is an acidic amino acid residue; or

[0472] Xₐₐ³⁰ is an acidic amino acid residue (e.g., Xₐₐ³⁰ is a Glu, Asp, phosphoserine, phosphotyrosine, or gamma-carboxyglutamic acid residue), if Xₐₐ²² is a basic amino acid residue or an Ala residue;

[0473] Xₐₐ³¹ is an Ile, Trp, Tyr, 5-bromoTrp, 6-bromoTrp, 5-chloroTrp, 6-chloroTrp, 1-Nal, 2-Nal, thioTrp, 1-Nal, or 2-Nal residue;

[0474] each of Xₐₐ³², Xₐₐ³³, and Xₐₐ³⁴ is independently absent or is independently a hydrophobic amino acid residue (e.g., Ala, Phe, Ile, Leu, Met, Val, Trp, Tyr, proline, thiaproline, methionine, glycine, 1-Nal, 2-Nal, 1′NMe-Trp, cyclopentylglycine (Cpg), phenylglycine, N-methylleucine, N-methylphenylalanine, N-methylvaline, cyclohexylglycine (Chg), cyclohexylalanine (Cha), 2-chloro-phenylalanine, 4-chloro-phenylalanine, 3,4-dichlorophenylalanine, 4-trifluoromethyl-phenylalanine, and 4-phenyl-phenylalanine (Bip) residues);

[0475] and wherein:

[0476] if Xₐₐ⁴ and Xₐₐ¹⁸ are both Cys residues, there is a disulfide bond between residue Xₐₐ⁴ and residue Xₐₐ¹⁸; or if Xₐₐ⁴ and Xₐₐ¹⁸ are both SeCys residues, there is a diselenide bond between residue Xₐₐ⁴ and residue Xₐₐ¹⁸;

[0477] if Xₐₐ¹¹ and Xₐₐ²³ are both Cys residues, there is a disulfide bond between residue Xₐₐ¹¹ and residue Xₐₐ²³; or if Xₐₐⁿ and Xₐₐ²³ are both SeCys residues, there is a diselenide bond between residue Xₐₐ¹¹ and residue Xₐₐ²³;

[0478] if Xₐₐ¹⁷ and Xₐₐ²⁷ are both Cys residues, there is a disulfide bond between residue Xₐₐ¹⁷ and residue Xₐₐ²⁷; or if Xₐₐ¹⁷ and Xₐₐ²⁷ are both SeCys residues, there is a diselenide bond between residue Xₐₐ¹⁷ and residue Xₐₐ²⁷;

[0479] the amino-terminal residue is optionally acetylated, biotinylated, or 4-pentynoylated, or PEGylated; and the carboxy-terminal residue is optionally amidated. Carboxy-terminally amidated embodiments are among particularly useful ones for therapeutic use. Many examples of such C-terminally amidated peptide analogs appear in Table 5.

[0480] In some useful embodiments, (i) Xₐₐ¹ is a Pra, Aha, AzK, thiaproline, Abu, Nva, Nle Sar, hLeu, hPhe, D-Leu, D-Phe, D-Ala, bAla, AllylG, CyA, or Atz residue, and Xₐₐ² is any amino acid residue (e.g., Xₐₐ² can be selected from Ala, Asp, Glu, Phe, Gly, His, Ile, Lys, Leu, Met, Asn, Pro, Gln, Arg, Ser, Thr, Val, Trp, Tyr, thiaproline, phosphoserine, phosphotyrosine, or gamma-carboxyglutamic acid, homolysine, ornithine, N-methyl-arginine, ω-aminoarginine, ω-methyl-arginine, 1-methyl-histidine, 3-methyl-histidine, homoarginine, N-methyl-lysine, N-ε-methyl lysine, Dab, norleucine, norvaline, 1-Nal, 2-Nal, cyclohexylglycine (Chg), cyclohexylalanine (Cha), 4-phenyl-phenylalanine (Bip), Pra, Aha, Abu, Nva, Nle Sar, hLeu, hPhe, D-Leu, D-Phe, D-Ala, bAla, AllylG, CyA, and Atz residues); or (ii) Xₐₐ¹ is absent and Xₐₐ² is a Pra, Aha, AzK, thiaproline, Abu, Nva, Nle, Sar, hLeu, hPhe, D-Leu, D-Phe, D-Ala, bAla, AllylG, CyA, or Atz residue.

[0481] In other embodiments, (i) Xₐₐ¹ can be selected from Ala, Asp, Glu, Phe, Gly, His, Ile, Lys, Leu, Met, Asn, Pro, Gln, Arg, Ser, Thr, Val, Trp, Tyr, thiaproline, phosphoserine, phosphotyrosine, or gamma-carboxyglutamic acid, homolysine, ornithine, N-methyl-arginine, ω-aminoarginine, ω-methyl-arginine, 1-methyl-histidine, 3-methyl-histidine, homoarginine, N-methyl-lysine, N-ε-methyl lysine, Dab, norleucine, norvaline, 1-Nal, 2-Nal, cyclohexylglycine (Chg), cyclohexylalanine (Cha), and 4-phenyl-phenylalanine (Bip) residues, and Xₐₐ² is any amino acid residue (e.g., Ala, Asp, Glu, Phe, Gly, His, Ile, Lys, Leu, Met, Asn, Pro, Gln, Arg, Ser, Thr, Val, Trp, Tyr, thiaproline, phosphoserine, phosphotyrosine, or gamma-carboxyglutamic acid, homolysine, ornithine, N-methyl-arginine, ω-aminoarginine, ω-methyl-arginine, 1-methyl-histidine, 3-methyl-histidine, homoarginine, N-methyl-lysine, N-ε-methyl lysine, Dab, norleucine, norvaline, 1-Nal, 2-Nal, cyclohexylglycine (Chg), cyclohexylalanine (Cha), or 4-phenyl-phenylalanine (Bip) residue); or (ii) Xₐₐ¹ is absent and Xₐₐ² can be selected from Ala, Asp, Glu, Phe, Gly, His, Ile, Lys, Leu, Met, Asn, Pro, Gln, Arg, Ser, Thr, Val, Trp, Tyr, thiaproline, phosphoserine, phosphotyrosine, or gamma-carboxyglutamic acid, homolysine, ornithine, N-methyl-arginine, ω-aminoarginine, ω-methyl-arginine, 1-methyl-histidine, 3-methyl-histidine, homoarginine, N-methyl-lysine, N-ε-methyl lysine, Dab, norleucine, norvaline, 1-Nal, 2-Nal, cyclohexylglycine (Chg), cyclohexylalanine (Cha), and 4-phenyl-phenylalanine (Bip) residues.

[0482] Any of the above-described examples of amino acid residues at the positions of SEQ ID NO:516 can also apply to the analogous positions of SEQ ID NO:590.

[0483] Another example of an inventive composition of the present invention is the composition of matter wherein the isolated polypeptide comprises the amino acid sequence of the formula:

[0484] Xₐₐ¹Xₐₐ²Xₐₐ³Xₐₐ⁴Xₐₐ⁵Xₐₐ⁶Xₐₐ⁷Xₐₐ⁸Xₐₐ⁹Xₐₐ¹⁰Xₐₐ¹¹Aspₐₐ¹²Xₐₐ¹³Xₐₐ¹⁴Argₐₐ¹⁵Xₐₐ¹⁶Xₐₐ¹⁷Xₐₐ¹⁸Xₐₐ¹⁹Xₐₐ²⁰Leuₐₐ²¹Xₐₐ²²Xₐₐ²³Xₐₐ²⁴Leuₐₐ²⁵Xₐₐ²⁶Xₐₐ²⁷Xₐₐ²⁸Xₐₐ²⁹Xₐₐ³⁰Xₐₐ³¹Xₐₐ³²Xₐₐ³³Xₐₐ³⁴//SEQ ID NO:517

[0485] or a pharmaceutically acceptable salt thereof,

[0486] wherein:

[0487] Xₐₐ¹ is absent; or Xₐₐ¹ is any amino acid residue (e.g., Xₐₐ¹ can be selected from Ala, Asp, Cys, Glu, Phe, Gly, His, Ile, Lys, Leu, Met, Asn, Pro, Gln, Arg, Ser, Thr, Val, Trp, Tyr, thiaproline, phosphoserine, phosphotyrosine, or gamma-carboxyglutamic acid, homolysine, ornithine, N-methyl-arginine, ω-aminoarginine, ω-methyl-arginine, 1-methyl-histidine, 3-methyl-histidine, homoarginine, N-methyl-lysine, N-ε-methyl lysine, Dab, Dap, norleucine, norvaline, 1-Nal, 2-Nal, cyclohexylglycine (Chg), cyclohexylalanine (Cha), and 4-phenyl-phenylalanine (Bip), Pra, Aha, AzK, Abu, Nva, Nle Sar, hLeu, hPhe, D-Leu, D-Phe, D-Ala, bAla, AllylG, CyA, and Atz residues);

[0488] Xₐₐ² is any hydrophobic amino acid residue, or a Pra, Aha, Abu, Nva, Nle, Sar, hLeu, hPhe, D-Leu, D-Phe, D-Ala, bAla, AllylG, CyA, or Atz residue;

[0489] Xₐₐ³ is any amino acid residue (e.g., Xₐₐ³ can be selected from Ala, Asp, Cys, Glu, Phe, Gly, His, Ile, Lys, Leu, Met, Asn, Pro, Gln, Arg, Ser, Thr, Val, Trp, Tyr, thiaproline, phosphoserine, phosphotyrosine, or gamma-carboxyglutamic acid, homolysine, ornithine, N-methyl-arginine, ω-aminoarginine, ω-methyl-arginine, 1-methyl-histidine, 3-methyl-histidine, homoarginine, N-methyl-lysine, N-ε-methyl lysine, Dab, Dap, norleucine, norvaline, 1-Nal, 2-Nal, cyclohexylglycine (Chg), cyclohexylalanine (Cha), and 4-phenyl-phenylalanine (Bip), Pra, Aha, AzK, Abu, Nva, Nle Sar, hLeu, hPhe, D-Leu, D-Phe, D-Ala, bAla, AllylG, CyA, and Atz residues);

[0490] Xₐₐ⁴ is Cys, if Xₐₐ¹⁸ is Cys; or Xₐₐ⁴ is SeCys, if Xₐₐ¹⁸ is SeCys;

[0491] Xₐₐ⁵ is any neutral hydrophilic (e.g., Xₐₐ⁵ is a Gln, Asn, Ser, Thr, or Cit residue) or basic (e.g., Xₐₐ⁵ is a histidine, lysine, homolysine, ornithine, Dab, Dap, arginine, N-methyl-arginine, ω-aminoarginine, ω-methyl-arginine, 1-methyl-histidine, 3-methyl-histidine, or homoarginine residue) amino acid residue;

[0492] Xₐₐ⁶ is any basic amino acid residue (e.g., Xₐₐ⁶ is a histidine, lysine, homolysine, ornithine, Dab, Dap, arginine, N-methyl-arginine, ω-aminoarginine, ω-methyl-arginine, 1-methyl-histidine, 3-methyl-histidine, or homoarginine residue);

[0493] Xₐₐ⁷ is a Trp, 5-bromoTrp, 6-bromoTrp, 5-chloroTrp, 6-chloroTrp, 1-Nal, 2-Nal, or thioTrp residue;

[0494] Xₐₐ⁸ is a Leu or Nle residue;

[0495] Xₐₐ⁹ is a Trp, 5-bromoTrp, 6-bromoTrp, 5-chloroTrp, 6-chloroTrp, 1-Nal, 2-Nal, or thioTrp residue;

[0496] Xₐₐ¹⁰ is a basic (e.g., Xₐₐ¹⁰ is a histidine, lysine, homolysine, ornithine, Dab, Dap, arginine, N-methyl-arginine, ω-aminoarginine, ω-methyl-arginine, 1-methyl-histidine, 3-methyl-histidine, or homoarginine residue) or neutral hydrophilic (e.g., Xₐₐ¹⁰ is a Gln, Asn, Ser, Thr, or Cit residue) amino acid residue, or an Ala residue;

[0497] Xₐₐ¹¹ is Cys if Xₐₐ²³ is Cys; or Xₐₐ¹¹ is SeCys if Xₐₐ²³ is SeCys;

[0498] Xₐₐ¹³ is any amino acid residue except a hydrophobic residue (e.g., Xₐₐ¹³ can be selected from Asp, Glu, His, Lys, Asn, Pro, Gln, Arg, Ser, Thr, phosphoserine, phosphotyrosine, or gamma-carboxyglutamic acid, homolysine, ornithine, N-methyl-arginine, w-aminoarginine, ω-methyl-arginine, 1-methyl-histidine, 3-methyl-histidine, homoarginine, N-methyl-lysine, N-ε-methyl lysine, Dab, Dap, norleucine, norvaline, Pra, Aha, AzK, Abu, Nva, Nle Sar, hLeu, hPhe, D-Leu, D-Phe, D-Ala, bAla, AllylG, CyA, and Atz residues);

[0499] Xₐₐ¹⁴ is a basic residue (e.g., Xₐₐ¹⁴ is a histidine, lysine, homolysine, ornithine, Dab, Dap, arginine, N-methyl-arginine, ω-aminoarginine, ω-methyl-arginine, 1-methyl-histidine, 3-methyl-histidine, or homoarginine residue) or an Ala residue;

[0500] Xₐₐ¹⁶ is any amino acid residue (e.g., Xₐₐ¹⁶ can be selected from Ala, Asp, Cys, Glu, Phe, Gly, His, Ile, Lys, Leu, Met, Asn, Pro, Gln, Arg, Ser, Thr, Val, Trp, Tyr, thiaproline, phosphoserine, phosphotyrosine, or gamma-carboxyglutamic acid, homolysine, ornithine, Dab, Dap, N-methyl-arginine, ω-aminoarginine, ω-methyl-arginine, 1-methyl-histidine, 3-methyl-histidine, homoarginine, N-methyl-lysine, N-ε-methyl lysine, Dab, norleucine, norvaline, 1-Nal, 2-Nal, cyclohexylglycine (Chg), cyclohexylalanine (Cha), 4-phenyl-phenylalanine (Bip), Pra, Aha, AzK, Abu, Nva, Nle Sar, hLeu, hPhe, D-Leu, D-Phe, D-Ala, bAla, AllylG, CyA, and Atz residues);

[0501] Xₐₐ¹⁷ is a Cys if Xₐₐ²⁷ is Cys; or Xₐₐ¹⁷ is a SeCys if Xₐₐ²⁷ is SeCys;

[0502] Xₐₐ¹⁸ is a Cys or SeCys;

[0503] Xₐₐ¹⁹ is any amino acid residue (e.g., Xₐₐ¹⁹ can be selected from Ala, Asp, Glu, Phe, Gly, His, Ile, Lys, Leu, Met, Asn, Pro, Gln, Arg, Ser, Thr, Val, Trp, Tyr, thiaproline, phosphoserine, phosphotyrosine, or gamma-carboxyglutamic acid, homolysine, ornithine, Dab, Dap, N-methyl-arginine, ω-aminoarginine, ω-methyl-arginine, 1-methyl-histidine, 3-methyl-histidine, homoarginine, N-methyl-lysine, N-ε-methyl lysine, Dab, norleucine, norvaline, 1-Nal, 2-Nal, cyclohexylglycine (Chg), cyclohexylalanine (Cha), 4-phenyl-phenylalanine (Bip), Pra, Aha, AzK, Abu, Nva, Nle Sar, hLeu, hPhe, D-Leu, D-Phe, D-Ala, bAla, AllylG, CyA, and Atz residues);

[0504] Xₐₐ²⁰ is a Gly or Ala residue;

[0505] Xₐₐ²² is a basic amino acid residue (e.g., Xₐₐ²² is a histidine, lysine, homolysine, ornithine, Dab, Dap, arginine, N-methyl-arginine, ω-aminoarginine, ω-methyl-arginine, 1-methyl-histidine, 3-methyl-histidine, or homoarginine residue) or an Ala residue;

[0506] Xₐₐ²³ is a Cys or SeCys residue;

[0507] Xₐₐ²⁴ is a basic amino acid residue (e.g., Xₐₐ²⁴ is a histidine, lysine, homolysine, ornithine, Dab, Dap, arginine, N-methyl-arginine, ω-aminoarginine, ω-methyl-arginine, 1-methyl-histidine, 3-methyl-histidine, or homoarginine residue) or an Ala residue;

[0508] Xₐₐ²⁶ is a Trp, 5-bromoTrp, 6-bromoTrp, 5-chloroTrp, 6-chloroTrp, 1-Nal, 2-Nal, or thioTrp residue;

[0509] Xₐₐ²⁷ is a Cys or SeCys residue;

[0510] Xₐₐ²⁸ is a basic amino acid residue (e.g., Xₐₐ²⁸ is a histidine, lysine, homolysine, ornithine, Dab, Dap, arginine, N-methyl-arginine, ω-aminoarginine, ω-methyl-arginine, 1-methyl-histidine, 3-methyl-histidine, or homoarginine residue);

[0511] Xₐₐ²⁹ is a basic amino acid residue (e.g., Xₐₐ²⁹ is a histidine, lysine, homolysine, ornithine, Dab, Dap, arginine, N-methyl-arginine, ω-aminoarginine, ω-methyl-arginine, 1-methyl-histidine, 3-methyl-histidine, or homoarginine residue);

[0512] Xₐₐ³⁰ is an Ile, Trp, Tyr, 5-bromoTrp, 6-bromoTrp, 5-chloroTrp, 6-chloroTrp, 1-Nal, 2-Nal, thioTrp, 1-Nal, or 2-Nal residue;

[0513] Xₐₐ³¹ is an Ile, Trp, Tyr, 5-bromoTrp, 6-bromoTrp, 5-chloroTrp, 6-chloroTrp, 1-Nal, 2-Nal, thioTrp, 1-Nal, or 2-Nal residue;

[0514] each of Xₐₐ³², Xₐₐ³³, and Xₐₐ³⁴ is independently absent or is independently a hydrophobic amino acid residue (e.g., Ala, Phe, Ile, Leu, Met, Val, Trp, Tyr, proline, thiaproline, methionine, glycine, 1-Nal, 2-Nal, 1′NMe-Trp, cyclopentylglycine (Cpg), phenylglycine, N-methylleucine, N-methylphenylalanine, N-methylvaline, cyclohexylglycine (Chg), cyclohexylalanine (Cha), 2-chloro-phenylalanine, 4-chloro-phenylalanine, 3,4-dichlorophenylalanine, 4-trifluoromethyl-phenylalanine, and 4-phenyl-phenylalanine (Bip) residues);

[0515] and wherein:

[0516] if Xₐₐ⁴ and Xₐₐ¹⁸ are both Cys residues, there is a disulfide bond between residue Xₐₐ⁴ and residue Xₐₐ¹⁸; or if Xₐₐ⁴ and Xₐₐ¹⁸ are both SeCys residues, there is a diselenide bond between residue Xₐₐ⁴ and residue Xₐₐ¹⁸;

[0517] if Xₐₐ¹¹ and Xₐₐ²³ are both Cys residues, there is a disulfide bond between residue Xₐₐ¹¹ and residue Xₐₐ²³; or if Xₐₐ¹¹ and Xₐₐ²³ are both SeCys residues, there is a diselenide bond between residue Xₐₐ¹¹ and residue Xₐₐ²³;

[0518] if Xₐₐ¹⁷ and Xₐₐ²⁷ are both Cys residues, there is a disulfide bond between residue Xₐₐ¹⁷ and residue Xₐₐ²⁷; or if Xₐₐ¹⁷ and Xₐₐ²⁷ are both SeCys residues, there is a diselenide bond between residue Xₐₐ¹⁷ and residue Xₐₐ²⁷;

[0519] the amino-terminal residue is optionally acetylated, biotinylated, or 4-pentynoylated, or PEGylated; and the carboxy-terminal residue is optionally amidated. Carboxy-terminally amidated embodiments are among particularly useful ones for therapeutic use. Many examples of such C-terminally amidated peptide analogs appear in Table 5.

[0520] In some useful embodiments, Xₐₐ² is a Pra, Aha, Abu, Nva, Nle, Sar, hLeu, hPhe, D-Leu, D-Phe, D-Ala, bAla, AllylG, CyA, Atz, Ala, Phe, Ile, Leu, Met, Val, Trp, Tyr, proline, thiaproline, methionine, glycine, 1-Nal, 2-Nal, 1′NMe-Trp, cyclopentylglycine (Cpg), phenylglycine, N-methylleucine, N-methylphenylalanine, N-methylvaline, cyclohexylglycine (Chg), cyclohexylalanine (Cha), 2-chloro-phenylalanine, 4-chloro-phenylalanine, 3,4-dichlorophenylalanine, 4-trifluoromethyl-phenylalanine, or 4-phenyl-phenylalanine (Bip) residue.

[0521] In other useful embodiments, (i) Xₐₐ¹ is a Pra, Aha, Abu, Nva, Nle Sar, hLeu, hPhe, D-Leu, D-Phe, D-Ala, bAla, AllylG, CyA, or Atz residue, and Xₐₐ² is any hydrophobic amino acid residue (e.g., Xₐₐ² can be selected from Phe, Ile, Leu, Met, Val, Trp, Tyr, thiaproline, norleucine, norvaline, 1-Nal, 2-Nal, cyclohexylglycine (Chg), cyclohexylalanine (Cha), and 4-phenyl-phenylalanine (Bip)), or a Pra, Aha, Abu, Nva, Nle, Sar, hLeu, hPhe, D-Leu, D-Phe, D-Ala, bAla, AllylG, CyA, and Atz residue; or (ii) Xₐₐ¹ is absent and Xₐₐ² is a Pra, Aha, AzK, thiaproline, Abu, Nva, Nle, Sar, hLeu, hPhe, D-Leu, D-Phe, D-Ala, bAla, AllylG, CyA, or Atz residue.

[0522] In other embodiments, (i) Xₐₐ¹ can be selected from Ala, Asp, Glu, Phe, Gly, His, Ile, Lys, Leu, Met, Asn, Pro, Gln, Arg, Ser, Thr, Val, Trp, Tyr, thiaproline, phosphoserine, phosphotyrosine, or gamma-carboxyglutamic acid, homolysine, ornithine, N-methyl-arginine, ω-aminoarginine, ω-methyl-arginine, 1-methyl-histidine, 3-methyl-histidine, homoarginine, N-methyl-lysine, N-ε-methyl lysine, Dab, norleucine, norvaline, 1-Nal, 2-Nal, cyclohexylglycine (Chg), cyclohexylalanine (Cha), and 4-phenyl-phenylalanine (Bip) residues, and Xₐₐ² is any hydrophobic amino acid residue (e.g., Phe, Ile, Leu, Met, Val, Trp, Tyr, thiaproline, norleucine, norvaline, 1-Nal, 2-Nal, cyclohexylglycine (Chg), cyclohexylalanine (Cha), or 4-phenyl-phenylalanine (Bip) residue) or a Pra, Aha, Abu, Nva, Nle, Sar, hLeu, hPhe, D-Leu, D-Phe, D-Ala, bAla, AllylG, CyA, or Atz residue; or (ii) Xₐₐ¹ is absent and Xₐₐ² can be selected from Phe, Ile, Leu, Met, Val, Trp, Tyr, thiaproline, norleucine, norvaline, 1-Nal, 2-Nal, cyclohexylglycine (Chg), cyclohexylalanine (Cha), and 4-phenyl-phenylalanine (Bip) residues.

[0523] Any of the above-described examples of amino acid residues at the positions of SEQ ID NO:517 can also apply to the analogous positions of SEQ ID NO:590.

[0524] Other exemplary embodiments of the inventive composition are unconjugated or conjugated peptide analogs of JzTx-V having one of the amino acid sequences as set forth in Table 5. Particular embodiments of the inventive isolated polypeptides that can either be unconjugated or conjugated, include those having an amino acid sequence selected from SEQ ID NOS: 63, 69, 110-115, 131, 137, 139-147, 149-150, 152-154, 157, 159-172, 174-175, 177-179, 182, 184-246, 273-274, 277, 279, 284-295, 297-356, 392-397, 406-409, 411-422, 426, 435-437, 439-445, 447-452, 455-475, 518, 520, 521, 523, 524, 526, 527, 546-563, 565-566, 568, 573, 574, 576, 577, 578-588, SEQ ID NO:597, SEQ ID NO:605, SEQ ID NO:614, SEQ ID NO:615, SEQ ID NO:635, SEQ ID NO:636, SEQ ID NO:640, SEQ ID NO:641, SEQ ID NO:642, SEQ ID NO:643, SEQ ID NO:644, SEQ ID NO:645, SEQ ID NO:657, SEQ ID NO:667, SEQ ID NO:687, SEQ ID NO:688, SEQ ID NOS: 692-697, SEQ ID NO:701, SEQ ID NO:702, SEQ ID NO:707, SEQ ID NO:708, SEQ ID NO:709, SEQ ID NOS: 714-718, SEQ ID NO:721, SEQ ID NO:723, SEQ ID NOS: 726-729, SEQ ID NOS: 731-757, SEQ ID NOS: 764-785, SEQ ID NO:789, SEQ ID NO:790, SEQ ID NO:791, SEQ ID NOS: 795-801, SEQ ID NO:803, SEQ ID NO:804, SEQ ID NO:805, SEQ ID NO:807, SEQ ID NO:808, SEQ ID NO:809, SEQ ID NO:814, SEQ ID NOS: 816-824, SEQ ID NO:828, SEQ ID NO:829, SEQ ID NO:831, SEQ ID NO:833, SEQ ID NOS: 835-870, SEQ ID NOS: 873-885, SEQ ID NOS: 888-909, SEQ ID NO:911, SEQ ID NO:912, SEQ ID NO:913, SEQ ID NO:923, SEQ ID NO:924, SEQ ID NO:925, SEQ ID NO:929, SEQ ID NO:930, SEQ ID NO:931, SEQ ID NOS: 941-984, SEQ ID NOS: 986-1033, SEQ ID NOS: 1136-1188, SEQ ID NOS: 1190-1242, SEQ ID NO:1350, SEQ ID NO:1351, SEQ ID NO:1352, SEQ ID NO:1353, SEQ ID NOS: 1358-1369, SEQ ID NOS: 1382-1393, SEQ ID NOS: 1406-1417, SEQ ID NO:1430, SEQ ID NOS: 1432-1443, SEQ ID NOS: 1456-1467, SEQ ID NOS: 1480-1491, SEQ ID NOS: 1510-1515, SEQ ID NOS: 1522-1527, SEQ ID NOS: 1534-1611, SEQ ID NO:1613, SEQ ID NOS: 1615-1640, SEQ ID NO:1644, SEQ ID NO:1645, and SEQ ID NOS: 1649-1694, as set forth in Table 5; or comprises an amino acid sequence selected from SEQ ID NOS: 63, 69, 112-113, 115, 131, 137, 193-196, 200-203, 207-210, 214-217, 221-224, 228-231, 235-238, 242-246, 277, and 279, as set forth in Table 5, that does not include a non-canonical amino acid.

[0525] Some embodiments that can either be unconjugated or conjugated comprise useful combinations of mutations to the native JzTx-V amino acid sequence, e.g, Glu residues at Xaa¹⁴ and Xaa³⁰ of SEQ ID NO:590, such as SEQ ID NOS: 715, 728, 732, 735, 737, 742, 744, 746, 747, 748, 749, 753, 754, 755, 756, 757, 835, 836, 837, 953, 954, 955, 956, 957, 969, 970, 971, 972, 973, 974, 975, 976, 977, 978, 979, 980, 981, 982, 983, 984, 1002, 1003, 1004, 1005, 1006, 1018, 1019, 1020, 1021, 1022, 1023, 1024, 1025, 1026, 1027, 1028, 1029, 1030, 1031, 1032, 1137, 1157, 1158, 1159, 1160, 1161, 1173, 1174, 1175, 1176, 1177, 1178, 1179, 1180, 1181, 1182, 1183, 1184, 1185, 1186, 1187, 1188, 1191, 1211, 1212, 1213, 1214, 1225, 1227, 1228, 1229, 1230, 1231, 1232, 1233, 1234, 1235, 1236, 1237, 1238, 1239, 1240, 1241, 1242, 1351, 1353, 1360, 1362, 1363, 1366, 1368, 1369, 1384, 1386, 1387, 1390, 1392, 1393, 1408, 1410, 1411, 1414, 1416, 1417, 1434, 1436, 1437, 1440, 1442, 1443, 1458, 1460, 1461, 1464, 1466, 1467, 1482, 1484, 1485, 1488, 1490, 1491, 1628, 1629, 1673, 1674, 1677, 1678, 1683, 1686, or 1687, as set forth in Table 5.

[0526] Other examples that can either be unconjugated or conjugated include Glu residues at Xaa¹⁶ and Xaa³⁰ of SEQ ID NO:590, such as SEQ ID NOS: 717, 733,738, 740, 743, 745, 747, 749, 750, 751, 752, 753, 755, 756, 757, 770, 771, 773, 958, 959, 960, 961, 962, 963, 1138, 1162, 1163, 1164, 1165, 1166, 1167, 1192, 1361, 1367, 1385, 1391, 1409, 1415, 1430, 1435, 1441, 1459, 1465, 1483, 1489, 1596, 1597, 1598, 1600, 1602, 1645, or 1694, as set forth in Table 5.

[0527] Still other examples that can either be unconjugated or conjugated include Glu residues at Xaa¹⁴ and Xaa³⁰ and a 5-BrTrp residue at Xₐₐ²⁶ of SEQ ID NO:590, such as SEQ ID NOS: 1137, 1157, 1158, 1159, 1160, 1161, 1173, 1174, 1175, 1176, 1177, 1178, 1179, 1180, 1181, 1182, 1183, 1184, 1185, 1186, 1187, 1188, 1191, 1211, 1212, 1213, 1214, 1215, 1227, 1228, 1229, 1230, 1231, 1232, 1233, 1234, 1235, 1236, 1237, 1238, 1239, 1240, 1241, 1242, 1351, 1353, 1360, 1362, 1363, 1366, 1368, 1369, 1384, 1386, 1387, 1390, 1392, 1393, 1408, 1410, 1411, 1414, 1416, 1417, 1434, 1436, 1437, 1440, 1442, 1443, 1458, 1460, 1461, 1464, 1466, 1467, 1482, 1484, 1485, 1488, 1490, 1491, or 1629, as set forth in Table 5.

[0528] Additional examples that can either be unconjugated or conjugated include Glu residues at Xaa¹⁶ and Xaa³⁰ and a 5-BrTrp residue at Xₐₐ²⁶ of SEQ ID NO:590, such as SEQ ID NOS: 1138, 1162, 1163, 1164, 1165, 1166, 1167, 1192, 1361, 1367, 1385, 1391, 1409, 1415, 1430, 1435, 1441, 1459, 1465, 1483, or 1489, as set forth in Table 5.

[0529] In other embodiments that can either be unconjugated or conjugated, the composition of matter comprises an amino acid sequence selected from SEQ ID NOS: 247, 296, 358, 360, 361, 363-370, 372-391, 398-405, 410, 423-425, 427, 431-434, 438, 446, 453, 454, 571, 579-587, and 588, as set forth in Table 5.

[0530] Any of the above-described sequences further comprising an optional linker moiety and a pharmaceutically acceptable, covalently linked half-life extending moiety, as described herein, are also encompassed within the present invention. A pharmaceutical composition comprising any of these polypeptides (with or without a covalently linked half-life extending moiety) and a pharmaceutically acceptable carrier is also encompassed within the present invention.

TABLE 5
Amino acid sequences of
JzTx-V and JzTx-V peptide analogs.

| SEQ | | |
|---|---|---|
| ID | | |
| NO. | Designation | Amino Acid Sequence |
| 1 | JzTx-V(1-29)-FreeAcid | {H}-YCQKWMWTCDSKRACCE |
| | | GLRCKLWCRKII- |
| | | {FreeAcid} |
| 2 | JzTx-V(1-29) | {H]-YCQKWMWTCDSKRACCE |
| | | GLRCKLWCRKII-{Amide} |
| 3 | [Ala1]JzTx-V(1-29) | {H}-ACQKWMWTCDSKRACCE |
| | | GLRCKLWCRKII-{Amide} |
| 4 | [Ala3]JzTx-V(1-29) | {H}-YCAKWMWTCDSKRACCE |
| | | GLRCKLWCRKII-{Amide} |
| 5 | [Ala4]JzTx-V(1-29) | {H}-YCQAWMWTCDSKRACCE |
| | | GLRCKLWCRKII-{Amide} |
| 6 | [Ala5]JzTx-V(1-29) | {H}-YCQKAMWTCDSKRACCE |
| | | GLRCKLWCRKII-{Amide} |
| 7 | [Ala6]JzTx-V(1-29) | {H}-YCQKWAWTCDSKRACCE |
| | | GLRCKLWCRKII-{Amide} |
| 8 | [Ala7]JzTx-V(1-29) | {H}-YCQKWMATCDSKRACCE |
| | | GLRCKLWCRKII-{Amide} |
| 9 | [Ala8]JzTx-V(1-29) | {H}-YCQKWMWACDSKRACCE |
| | | GLRCKLWCRKII-{Amide} |
| 10 | [Ala10]JzTx-V(1-29) | {H}-YCQKWMWTCASKRACCE |
| | | GLRCKLWCRKII-{Amide} |
| 11 | [Ala11]JzTx-V(1-29) | {H}-YCQKWMWTCDAKRACCE |
| | | GLRCKLWCRKII-{Amide} |
| 12 | [Ala12]JzTx-V(1-29) | {H}-YCQKWMWTCDSARACCE |
| | | GLRCKLWCRKII-{Amide} |
| 13 | [Ala13]JzTx-V(1-29) | {H}-YCQKWMWTCDSKAACCE |
| | | GLRCKLWCRKII-{Amide} |
| 14 | [Ala17]JzTx-V(1-29) | {H}-YCQKWMWTCDSKRACCA |
| | | GLRCKLWCRKII-{Amide} |
| 15 | [Ala18]JzTx-V(1-29) | {H}-YCQKWMWTCDSKRACCE |
| | | ALRCKLWCRKII-{Amide} |
| 16 | [Ala19]JzTx-V(1-29) | {H}-YCQKWMWTCDSKRACCE |
| | | GARCKLWCRKII-{Amide} |
| 17 | [Ala20]JzTx-V(1-29) | {H}-YCQKWMWTCDSKRACCE |
| | | GLACKLWCRKII-{Amide} |
| 18 | [Ala22]JzTx-V(1-29) | {H}-YCQKWMWTCDSKRACCE |
| | | GLRCALWCRKII-{Amide} |
| 19 | [Ala23]JzTx-V(1-29) | {H}-YCQKWMWTCDSKRACCE |
| | | GLRCKAWCRKII-{Amide} |
| 20 | [Ala24]JzTx-V(1-29) | {H}-YCQKWMWTCDSKRACCE |
| | | GLRCKLACRKII-{Amide} |
| 21 | [Ala26]JzTx-V(1-29) | {H}-YCQKWMWTCDSKRACCE |
| | | GLRCKLWCAKII-{Amide} |
| 22 | [Ala27]JzTx-V(1-29) | {H}-YCQKWMWTCDSKRACCE |
| | | GLRCKLWCRAII-{Amide} |
| 23 | [Ala28]JzTx-V(1-29) | {H}-YCQKWMWTCDSKRACCE |
| | | GLRCKLWCRKAI-{Amide} |
| 24 | [Ala29]JzTx-V(1-29) | {H}-YCQKWMWTCDSKRACCE |
| | | GLRCKLWCRKIA-{Amide} |
| 25 | [1-Nal1]JzTx-V(1-29) | {H}-[1-Nal]CQKWMWTCDS |
| | | KRACCEGLRCKLWCRKII- |
| | | {Amide} |
| 26 | [1-Nal3]JzTx-V(1-29) | {H}-YC[1-Nal]KWMWTCDS |
| | | KRACCEGLRCKLWCRKII- |
| | | {Amide} |
| 27 | [1-Nal4]JzTx-V(1-29) | {H}-YCQ[1-Nal]WMWTCDS |
| | | KRACCEGLRCKLWCRKII- |
| | | {Amide} |
| 28 | [1-Nal5]JzTx-V(1-29) | {H}-YCQK[1-Nal]MWTCDS |
| | | KRACCEGLRCKLWCRKII- |
| | | {Amide} |
| 29 | [1-Nal6]JzTx-V(1-29) | {H}-YCQKW[1-Nal]WTCDS |
| | | KRACCEGLRCKLWCRKII- |
| | | {Amide} |
| 30 | [1-Nal7]JzTx-V(1-29) | {H}-YCQKWM[1-Nal]TCDS |
| | | KRACCEGLRCKLWCRKII- |
| | | {Amide} |
| 31 | [1-Nal8]JzTx-V(1-29) | {H}-YCQKWMW[1-Nal]CDS |
| | | KRACCEGLRCKLWCRKII- |
| | | {Amide} |
| 32 | [1-Nal10]JzTx-V(1-29) | {H}-YCQKWMWC[1-Nal]DS |
| | | KRACCEGLRCKLWCRKII- |
| | | {Amide} |
| 33 | [1-Nal11]JzTx-V(1-29) | {H}-YCQKWMWCD[1-Nal]S |
| | | KRACCEGLRCKLWCRKII- |
| | | {Amide} |
| 34 | [1-Nal12]JzTx-V(1-29) | {H}-YCQKWMWCDS[1-Nal] |
| | | KRACCEGLRCKLWCRKII- |
| | | {Amide} |
| 35 | [1-Nal13]JzTx-V(1-29) | {H}-YCQKWMWCDSK |
| | | [1-Nal]RACCEGLRCKLWCR |
| | | KII-{Amide} |
| 36 | [1-Nal14]JzTx-V(1-29) | {H}-YCQKWMWCDSKR |
| | | [1-Nal]ACCEGLRCKLWCRK |
| | | II-{Amide} |
| 37 | [1-Nal17]JzTx-V(1-29) | {H}-YCQKWMWCDSKRACC |
| | | [1-Nal]EGLRCKLWCRKII- |
| | | {Amide} |
| 38 | [1-Nal18]JzTx-V(1-29) | {H}-YCQKWMWCDSKRACCE |
| | | [1-Nal]GLRCKLWCRKII- |
| | | {Amide} |
| 39 | [1-Nal19]JzTx-V(1-29) | {H}-YCQKWMWCDSKRACCEG |
| | | [1-Nal]LRCKLWCRKII- |
| | | {Amide} |
| 40 | [1-Nal20]JzTx-V(1-29) | {H}-YCQKWMWCDSKRACCEG |
| | | L[1-Nal]RCKLWCRKII- |
| | | {Amide} |
| 41 | [1-Nal22]JzTx-V(1-29) | {H}-YCQKWMWCDSKRACCEG |
| | | LRC[1-Nal]KLWCRKII- |
| | | {Amide} |
| 42 | [1-Nal23]JzTx-V(1-29) | {H}-YCQKWMWCDSKRACCEG |
| | | LRCK[1-Nal]LWCRKII- |
| | | {Amide} |
| 43 | [1-Nal24]JzTx-V(1-29) | {H}-YCQKWMWCDSKRACCEG |
| | | LRCKL[1-Nal]CRKII- |
| | | {Amide} |
| 44 | [1-Nal26]JzTx-V(1-29) | {H}-YCQKWMWCDSKRACCEG |
| | | LRCKLWC[1-Nal]KII- |
| | | {Amide} |
| 45 | [1-Nal27]JzTx-V(1-29) | {H}-YCQKWMWCDSKRACCEG |
| | | LRCKLWCR[1-Nal]II- |
| | | {Amide} |
| 46 | [1-Nal28]JzTx-V(1-29) | {H}-YCQKWMWCDSKRACCEG |
| | | LRCKLWCRK[1-Nal]I- |
| | | {Amide} |
| 47 | [1-Nal29]JzTx-V(1-29) | {H}-YCQKWMWCDSKRACCEG |
| | | LRCKLWCRKI[1-Nal]- |
| | | {Amide} |
| 49 | [Glu1]JzTx-V(1-29) | {H}-ECQKWMWTCDSKRACCE |
| | | GLRCKLWCRKII-{Amide} |
| 50 | [Glu3]JzTx-V(1-29) | {H}-YCEKWMWTCDSKRACCE |
| | | GLRCKLWCRKII-{Amide} |
| 51 | [Glu4]JzTx-V(1-29) | {H}-YCQEWMWTCDSKRACCE |
| | | GLRCKLWCRKII-{Amide} |
| 52 | [Glu5]JzTx-V(1-29) | {H}-YCQKEMWTCDSKRACCE |
| | | GLRCKLWCRKII-{Amide} |
| 53 | [Glu6]JzTx-V(1-29) | {H}-YCQKWEWTCDSKRACCE |
| | | GLRCKLWCRKII-{Amide} |
| 54 | [Glu7]JzTx-V(1-29) | {H}-YCQKWMETCDSKRACCE |
| | | GLRCKLWCRKII-{Amide} |
| 55 | [Glu8]JzTx-V(1-29) | {H}-YCQKWMWECDSKRACCE |
| | | GLRCKLWCRKII-{Amide} |
| 56 | [Glu10]JzTx-V(1-29) | {H}-YCQKWMWTCESKRACCE |
| | | GLRCKLWCRKII-{Amide} |
| 57 | [Glu11]JzTx-V(1-29) | {H}-YCQKWMWTCDEKRACCE |
| | | GLRCKLWCRKII-{Amide} |
| 58 | [Glu12]JzTx-V(1-29) | {H}-YCQKWMWTCDSERACCE |
| | | GLRCKLWCRKII-{Amide} |
| 59 | [Glu13]JzTx-V(1-29) | {H}-YCQKWMWTCDSKEACCE |
| | | GLRCKLWCRKII-{Amide} |
| 60 | [Glu14]JzTx-V(1-29) | {H}-YCQKWMWTCDSKRECCE |
| | | GLRCKLWCRKII-{Amide} |
| 61 | [Glu18]JzTx-V(1-29) | {H}-YCQKWMWTCDSKRACCE |
| | | ELRCKLWCRKII-{Amide} |
| 62 | [Glu19]JzTx-V(1-29) | {H}-YCQKWMWTCDSKRACCE |
| | | GERCKLWCRKII-{Amide} |
| 63 | [Glu20]JzTx-V(1-29) | {H}-YCQKWMWTCDSKRACCE |
| | | GLECKLWCRKII-{Amide} |
| 64 | [Glu22]JzTx-V(1-29) | {H}-YCQKWMWTCDSKRACCE |
| | | GLRCELWCRKII-{Amide} |
| 65 | [Glu23]JzTx-V(1-29) | {H}-YCQKWMWTCDSKRACCE |
| | | GLRCKEWCRKII-{Amide} |
| 66 | [Glu24]JzTx-V(1-29) | {H}-YCQKWMWTCDSKRACCE |
| | | GLRCKLECRKII-{Amide} |
| 67 | [Glu26]JzTx-V(1-29) | {H}-YCQKWMWTCDSKRACCE |
| | | GLRCKLWCEKII-{Amide} |
| 68 | [Glu27]JzTx-V(1-29) | {H}-YCQKWMWTCDSKRACCE |
| | | GLRCKLWCREII-{Amide} |
| 69 | [Glu28]JzTx-V(1-29) | {H}-YCQKWMWTCDSKRACCE |
| | | GLRCKLWCRKEI-{Amide} |
| 70 | [Glu29]JzTx-V(1-29) | {H}-YCQKWMWTCDSKRACCE |
| | | GLRCKLWCRKIE-{Amide} |
| 71 | [Lys1]JzTx-V(1-29) | {H}-KCQKWMWTCDSKRACCE |
| | | GLRCKLWCRKII-{Amide} |
| 72 | [Lys3]JzTx-V(1-29) | {H}-YCKKWMWTCDSKRACCE |
| | | GLRCKLWCRKII-{Amide} |
| 73 | [Lys5]JzTx-V(1-29) | {H}-YCQKKMWTCDSKRACCE |
| | | GLRCKLWCRKII-{Amide} |
| 74 | [Lys6]JzTx-V(1-29) | {H}-YCQKWKWTCDSKRACCE |
| | | GLRCKLWCRKII-{Amide} |
| 75 | [Lys7]JzTx-V(1-29) | {H}-YCQKWMKTCDSKRACCE |
| | | GLRCKLWCRKII-{Amide} |
| 76 | [Lys8]JzTx-V(1-29) | {H}-YCQKWMWKCDSKRACCE |
| | | GLRCKLWCRKII-{Amide} |
| 77 | [Lys10]JzTx-V(1-29) | {H}-YCQKWMWTCKSKRACCE |
| | | GLRCKLWCRKII-{Amide} |
| 78 | [Lys11]JzTx-V(1-29) | {H}-YCQKWMWTCDKKRACCE |
| | | GLRCKLWCRKII-{Amide} |
| 79 | [Lys13]JzTx-V(1-29) | {H}-YCQKWMWTCDSKKACCE |
| | | GLRCKLWCRKII-{Amide} |
| 80 | [Lys14]JzTx-V(1-29) | {H}-YCQKWMWTCDSKRKCCE |
| | | GLRCKLWCRKII-{Amide} |
| 81 | [Lys17]JzTx-V(1-29) | {H}-YCQKWMWTCDSKRACCK |
| | | GLRCKLWCRKII-{Amide} |
| 82 | [Lys18]JzTx-V(1-29) | {H}-YCQKWMWTCDSKRACCE |
| | | KLRCKLWCRKII-{Amide} |
| 83 | [Lys19]JzTx-V(1-29) | {H}-YCQKWMWTCDSKRACCE |
| | | GKRCKLWCRKII-{Amide} |
| 84 | [Lys20]JzTx-V(1-29) | {H}-YCQKWMWTCDSKRACCE |
| | | GLKCKLWCRKII-{Amide} |
| 85 | [Lys23]JzTx-V(1-29) | {H}-YCQKWMWTCDSKRACCE |
| | | GLRCKKWCRKII-{Amide} |
| 86 | [Lys24]JzTx-V(1-29) | {H}-YCQKWMWTCDSKRACCE |
| | | GLRCKLKCRKII-{Amide} |
| 87 | [Lys26]JzTx-V(1-29) | {H}-YCQKWMWTCDSKRACCE |
| | | GLRCKLWCKKII-{Amide} |
| 88 | [Lys28]JzTx-V(1-29) | {H}-YCQKWMWTCDSKRACCE |
| | | GLRCKLWCRKKI-{Amide} |
| 89 | [Lys29]JzTx-V(1-29) | {H}-YCQKWMWTCDSKRACCE |
| | | GLRCKLWCRKIK-{Amide} |
| 90 | [Arg1]JzTx-V(1-29) | {H}-RCQKWMWTCDSKRACCE |
| | | GLRCKLWCRKII-{Amide} |
| 91 | [Arg3]JzTx-V(1-29) | {H}-YCRKWMWTCDSKRACCE |
| | | GLRCKLWCRKII-{Amide} |
| 92 | [Arg4]JzTx-V(1-29) | {H}-YCQRWMWTCDSKRACCE |
| | | GLRCKLWCRKII-{Amide} |
| 93 | [Arg5]JzTx-V(1-29) | {H}-YCQKRMWTCDSKRACCE |
| | | GLRCKLWCRKII-{Amide} |
| 94 | [Arg6]JzTx-V(1-29) | {H}-YCQKWRWTCDSKRACCE |
| | | GLRCKLWCRKII-{Amide} |
| 95 | [Arg7]JzTx-V(1-29) | {H}-YCQKWMRTCDSKRACCE |
| | | GLRCKLWCRKII-{Amide} |
| 96 | [Arg8]JzTx-V(1-29) | {H}-YCQKWMWRCDSKRACCE |
| | | GLRCKLWCRKII-{Amide} |
| 97 | [Arg10]JzTx-V(1-29) | {H}-YCQKWMWTCRSKRACCE |
| | | GLRCKLWCRKII-{Amide} |
| 98 | [Arg11]JzTx-V(1-29) | {H}-YCQKWMWTCDRKRACCE |
| | | GLRCKLWCRKII-{Amide} |
| 99 | [Arg12]JzTx-V(1-29) | {H}-YCQKWMWTCDSRRACCE |
| | | GLRCKLWCRKII-{Amide} |
| 100 | [Arg14]JzTx-V(1-29) | {H}-YCQKWMWTCDSKRRCCE |
| | | GLRCKLWCRKII-{Amide} |
| 101 | [Arg17]JzTx-V(1-29) | {H}-YCQKWMWTCDSKRACCR |
| | | GLRCKLWCRKII-{Amide} |
| 102 | [Arg18]JzTx-V(1-29) | {H}-YCQKWMWTCDSKRACCE |
| | | RLRCKLWCRKII-{Amide} |
| 103 | [Arg19]JzTx-V(1-29) | {H}-YCQKWMWTCDSKRACCE |
| | | GRRCKLWCRKII-{Amide} |
| 104 | [Arg22]JzTx-V(1-29) | {H}-YCQKWMWTCDSKRACCE |
| | | GLRCRLWCRKII-{Amide} |
| 105 | [Arg23]JzTx-V(1-29) | {H}-YCQKWMWTCDSKRACCE |
| | | GLRCKRWCRKII-{Amide} |
| 106 | [Arg24]JzTx-V(1-29) | {H}-YCQKWMWTCDSKRACCE |
| | | GLRCKLRCRKII-{Amide} |
| 107 | [Arg27]JzTx-V(1-29) | {H}-YCQKWMWTCDSKRACCE |
| | | GLRCKLWCRRII-{Amide} |
| 108 | [Arg28]JzTx-V(1-29) | {H}-YCQKWMWTCDSKRACCE |
| | | GLRCKLWCRKRI-{Amide} |
| 109 | [Arg29]JzTx-V(1-29) | {H}-YCQKWMWTCDSKRACCE |
| | | GLRCKLWCRKIR-{Amide} |
| 110 | [Nle6;Glu20]JzTx-V(1-29) | {H}-YCQKW[Nle]WTCDSKR |
| | | ACCEGLECKLWCRKII- |
| | | {Amide} |
| 111 | [Nva6;Glu20]JzTx-V(1-29) | {H}-YCQKW[Nva]WTCDSKR |
| | | ACCEGLECKLWCRKII- |
| | | {Amide} |
| 112 | [Glu20;Trp29]JzTx-V(1-29) | {H}-YCQKWMWTCDSKRACCE |
| | | GLECKLWCRKIW-{Amide} |
| 113 | [Glu20]JzTx-V(1-29)-Trp | {H}-YCQKWMWTCDSKRACCE |
| | | GLECKLWCRKIIW-{Amide} |
| 114 | [Cpa20]JzTx-V(1-29) | {H}-YCQKWMWTCDSKRACCE |
| | | GL[Cpa]CKLWCRKII- |
| | | {Amide} |
| 115 | [Asp20]JzTx-V(1-29) | {H}-YCQKWMWTCDSKRACCE |
| | | GLDCKLWCRKII-{Amide} |
| 116 | [4-Cl-F20]JzTx-V(1-29) | {H}-YCQKWMWTCDSKRACCE |
| | | GL[4-Cl-F]CKLWCRKII- |
| | | {Amide} |
| 117 | [Abu20]JzTx-V(1-29) | {H}-YCQKWMWTCDSKRACCE |
| | | GL[Abu]CKLWCRKII- |
| | | {Amide} |
| 118 | [Ile20]JzTx-V(1-29) | {H}-YCQKWMWTCDSKRACCE |
| | | GLICKLWCRKII-{Amide} |
| 119 | [Leu20]JzTx-V(1-29) | {H}-YCQKWMWTCDSKRACCE |
| | | GLLCKLWCRKII-{Amide} |
| 120 | [Val20]JzTx-V(1-29) | {H}-YCQKWMWTCDSKRACCE |
| | | GLVCKLWCRKII-{Amide} |
| 121 | [Gly20]JzTx-V(1-29) | {H}-YCQKWMWTCDSKRACCE |
| | | GLGCKLWCRKII-{Amide} |
| 122 | [Cit20]JzTx-V(1-29) | {H}-YCQKWMWTCDSKRACCE |
| | | GL[Cit]CKLWCRKII- |
| | | {Amide} |
| 123 | [Nva20]JzTx-V(1-29) | {H}-YCQKWMWTCDSKRACCE |
| | | GL[Nva]CKLWCRKII- |
| | | {Amide} |
| 124 | [Tyr20]JzTx-V(1-29) | {H}-YCQKWMWTCDSKRACCE |
| | | GLYCKLWCRKII-{Amide} |
| 125 | [Ser20]JzTx-V(1-29) | {H}-YCQKWMWTCDSKRACCE |
| | | GLSCKLWCRKII-{Amide} |
| 126 | [Glu20,28]JzTx-V(1-29) | {H}-YCQKWMWTCDSKRACCE |
| | | GLECKLWCRKEI-{Amide} |
| 127 | [Glu20;Cpa28]JzTx-V(1-29) | {H}-YCQKWMWTCDSKRACCE |
| | | GLECKLWCRK[Cpa]I- |
| | | {Amide} |
| 128 | [Glu20;Asp28]JzTx-V(1-29) | {H}-YCQKWMWTCDSKRACCE |
| | | GLECKLWCRKDI-{Amide} |
| 129 | [Glu20;4-Cl-F28]JzTx-V(1-29) | {H}-YCQKWMWTCDSKRACCE |
| | | GLECKLWCRK[4-Cl-F]I- |
| | | {Amide} |
| 130 | [Glu20;Abu28]JzTx-V(1-29) | {H}-YCQKWMWTCDSKRACCE |
| | | GLECKLWCRK[Abu]I- |
| | | {Amide} |
| 131 | [Glu20]JzTx-V(1-29) | {H}-YCQKWMWTCDSKRACCE |
| | | GLECKLWCRKII-{Amide} |
| 132 | [Glu20;Leu28]JzTx-V(1-29) | {H}-YCQKWMWTCDSKRACCE |
| | | GLECKLWCRKLI-{Amide} |
| 133 | [Glu20;Val28]JzTx-V(1-29) | {H}-YCQKWMWTCDSKRACCE |
| | | GLECKLWCRKVI-{Amide} |
| 134 | [Glu20;Gly28]JzTx-V(1-29) | {H}-YCQKWMWTCDSKRACCE |
| | | GLECKLWCRKGI-{Amide} |
| 135 | [Glu20;Cit28]JzTx-V(1-29) | {H}-YCQKWMWTCDSKRACCE |
| | | GLECKLWCRK[Cit]I- |
| | | {Amide} |
| 136 | [Glu20;Nva28]JzTx-V(1-29) | {H}-YCQKWMWTCDSKRACCE |
| | | GLECKLWCRK[Nva]I- |
| | | {Amide} |
| 137 | [Glu20;Tyr28]JzTx-V(1-29) | {H}-YCQKWMWTCDSKRACCE |
| | | GLECKLWCRKYI-{Amide} |
| 138 | [Glu20;Ser28]JzTx-V(1-29) | {H}-YCQKWMWTCDSKRACCE |
| | | GLECKLWCRKSI-{Amide} |
| 139 | 4-Pen-[Glu20]JzTx-V(1-29) | {4-Pen}-YCQKWMWTCDSKR |
| | | ACCEGLECKLWCRKII- |
| | | {Amide} |
| 140 | [Pra1;Glu20]JzTx-V(1-29) | {H}-[Pra]CQKWMWTCDSKR |
| | | ACCEGLECKLWCRKII- |
| | | {Amide} |
| 141 | [Pra3;Glu20]JzTx-V(1-29) | {H}-YC[Pra]KWMWTCDSKR |
| | | ACCEGLECKLWCRKII- |
| | | {Amide} |
| 142 | [Pra4;Glu20]JzTx-V(1-29) | {H}-YCQ[Pra]WMWTCDSKR |
| | | ACCEGLECKLWCRKII- |
| | | {Amide} |
| 143 | [Pra5;Glu20]JzTx-V(1-29) | {H}-YCQK[Pra]MWTCDSKR |
| | | ACCEGLECKLWCRKII- |
| | | {Amide} |
| 144 | [Pra6;Glu20]JzTx-V(1-29) | {H}-YCQKW[Pra]WTCDSKR |
| | | ACCEGLECKLWCRKII- |
| | | {Amide} |
| 145 | [Pra7;Glu20]JzTx-V(1-29) | {H}-YCQKWM[Pra]TCDSKR |
| | | ACCEGLECKLWCRKII- |
| | | {Amide} |
| 146 | [Pra8;Glu20]JzTx-V(1-29) | {H}-YCQKWMW[Pra]CDSKR |
| | | ACCEGLECKLWCRKII- |
| | | {Amide} |
| 147 | [Pra9;Glu20]JzTx-V(1-29) | {H}-YCQKWMWT[Pra]DSKR |
| | | ACCEGLECKLWCRKII- |
| | | {Amide} |
| 148 | [Pra10;Glu20+JzTx-V(1-29) | {H}-YCQKWMWTC[Pra]SKR |
| | | ACCEGLECKLWCRKII- |
| | | {Amide} |
| 149 | [Pra11;Glu20]JzTx-V(1-29) | {H}-YCQKWMWTCD[Pra]KR |
| | | ACCEGLECKLWCRKII- |
| | | {Amide} |
| 150 | [Pra12;Glu20]JzTx-V(1-29) | {H}-YCQKWMWTCDS[Pra]R |
| | | ACCEGLECKLWCRKII- |
| | | {Amide} |
| 151 | [Pra13;Glu20]JzTx-V(1-29) | {H}-YCQKWMWTCDSK[Pra] |
| | | ACCEGLECKLWCRKII- |
| | | {Amide} |
| 152 | [Pra14;Glu20]JzTx-V(1-29) | {H}-YCQKWMWTCDSKR |
| | | [Pra]CCEGLECKLWCRKII- |
| | | {Amide} |
| 153 | [Pra17;Glu20]JzTx-V(1-29) | {H}-YCQKWMWTCDSKRACC |
| | | [Pra]GLECKLWCRKII- |
| | | {Amide} |
| 154 | [Pra18;Glu20]JzTx-V(1-29) | {H}-YCQKWMWTCDSKRACCE |
| | | [Pra]LECKLWCRKII- |
| | | {Amide} |
| 155 | [Pra19;Glu20]JzTx-V(1-29) | {H}-YCQKWMWTCDSKRACCE |
| | | G[Pra]ECKLWCRKII- |
| | | {Amide} |
| 156 | [Pra20]JzTx-V(1-29) | {H}-YCQKWMWTCDSKRACCE |
| | | GL[Pra]CKLWCRKII- |
| | | {Amide} |
| 157 | [Glu20;Pra22]JzTx-V(1-29) | {H}-YCQKWMWTCDSKRACCE |
| | | GLEC[Pra]LWCRKII- |
| | | {Amide} |
| 158 | [Glu20;Pra23]JzTx-V(1-29) | {H}-YCQKWMWTCDSKRACCE |
| | | GLECK[Pra]WCRKII- |
| | | {Amide} |
| 159 | [Glu20;Pra24]JzTx-V(1-29) | {H}-YCQKWMWTCDSKRACCE |
| | | GLECKL[Pra]CRKII- |
| | | {Amide} |
| 160 | [Glu20;Pra26]JzTx-V(1-29) | {H}-YCQKWMWTCDSKRACCE |
| | | GLECKLWC[Pra]KII- |
| | | {Amide} |
| 161 | [Glu20;Pra27]JzTx-V(1-29) | {H}-YCQKWMWTCDSKRACCE |
| | | GLECKLWCR[Pra]II- |
| | | {Amide} |
| 162 | [Glu20;Pra28]JzTx-V(1-29) | {H}-YCQKWMWTCDSKRACCE |
| | | GLECKLWCRK[Pra]I- |
| | | {Amide} |
| 163 | [Glu20;Pra29]JzTx-V(1-29) | {H}-YCQKWMWTCDSKRACCE |
| | | GLECKLWCRKI[Pra]- |
| | | {Amide} |
| 164 | 4-Pen-[Glu20]JzTx-V(1-29) | {4-Pen}-YCQKWMWTCDSKR |
| | | ACCEGLECKLWCRKII- |
| | | {Amide} |
| 165 | [Pra(NPeg9)1;Glu20]JzTx-V(1-29) | {H}-[Atz(PEG10)CQKWMW |
| | | TCDSKRACCEGLECKLWCRKI |
| | | I-{Amide} |
| 166 | [Pra(NPeg9)3;Glu20]JzTx-V(1-29) | {H}-YC[Atz(PEG10)KWMW |
| | | TCDSKRACCEGLECKLWCRKI |
| | | I-{Amide} |
| 167 | [Pra(NPeg9)4;Glu20]JzTx-V(1-29) | {H}-YCQ[Atz(PEG10)WMW |
| | | TCDSKRACCEGLECKLWCRKI |
| | | I-{Amide} |
| 168 | [Pra(NPeg9)5;Glu20]JzTx-V(1-29) | {H}-YCQK[Atz(PEG10)MW |
| | | TCDSKRACCEGLECKLWCRKI |
| | | I-{Amide} |
| 169 | [Pra(NPeg9)6;Glu20]JzTx-V(1-29) | {H}-YCQKW[Atz(PEG10)W |
| | | TCDSKRACCEGLECKLWCRKI |
| | | I-{Amide} |
| 170 | [Pra(NPeg9)7;Glu20]JzTx-V(1-29) | {H}-YCQKWM[Atz(PEG10) |
| | | TCDSKRACCEGLECKLWCRKI |
| | | I-{Amide} |
| 171 | [Pra(NPeg9)8;Glu20]JzTx-V(1-29) | {H}-YCQKWMW |
| | | [Atz(PEG10)CDSKRACCEG |
| | | LECKLWCRKII-{Amide} |
| 172 | [Pra(NPeg9)9;Glu20]JzTx-V(1-29) | {H}-YCQKWMWT |
| | | [Atz(PEG10)DSKRACCEGL |
| | | ECKLWCRKII-{Amide} |
| 173 | [Pra(NPeg9)10;Glu20]JzTx-V(1-29) | {H}-YCQKWMWTC |
| | | [Atz(PEG10)SKRACCEGLE |
| | | CKLWCRKII-{Amide} |
| 174 | [Pra(NPeg9)11;Glu20]JzTx-V(1-29) | {H}-YCQKWMWTCD |
| | | [Atz(PEG10)KRACCEGLEC |
| | | KLWCRKII-{Amide} |
| 175 | [Pra(NPeg9)12;Glu20]JzTx-V(1-29) | {H}-YCQKWMWTCDS |
| | | [Atz(PEG10)RACCEGLECK |
| | | LWCRKII-{Amide} |
| 176 | [Pra(NPeg9)13;Glu20]JzTx-V(1-29) | {H}-YCQKWMWTCDSK |
| | | [Atz(PEG10)ACCEGLECKL |
| | | WCRKII-{Amide} |
| 177 | [Pra(NPeg9)14;Glu20]JzTx-V(1-29) | {H}-YCQKWMWTCDSKR |
| | | [Atz(PEG10)CCEGLECKLW |
| | | CRKII-{Amide} |
| 178 | [Pra(NPeg9)17;Glu20]JzTx-V(1-29) | {H}-YCQKWMWTCDSKRACC |
| | | [Atz(PEG10)GLECKLWCRK |
| | | II-{Amide} |
| 179 | [Pra(NPeg9)18;Glu20]JzTx-V(1-29) | {H}-YCQKWMWTCDSKRACCE |
| | | [Atz(PEG10)LECKLWCRKI |
| | | I-{Amide} |
| 180 | [Pra(NPeg9)19;Glu20]JzTx-V(1-29) | {H}-YCQKWMWTCDSKRACCE |
| | | G[Atz(PEG10)ECKLWCRKI |
| | | I-{Amide} |
| 181 | [(NPeg9)20]JzTx-V(1-29) | {H}-YCQKWMWTCDSKRACCE |
| | | GL[Atz(PEG10)CKLWCRKI |
| | | I-{Amide} |
| 182 | [Glu20;Pra(NPeg9)22]JzTx-V(1-29) | {H}-YCQKWMWTCDSKRACCE |
| | | GLEC[Atz(PEG10)LWCRKI |
| | | I-{Amide} |
| 183 | [Glu20;Pra(NPeg9)23]JzTx-V(1-29) | {H}-YCQKWMWTCDSKRACCE |
| | | GLECK[Atz(PEG10)WCRKI |
| | | I-{Amide} |
| 184 | [Glu20;Pra(NPeg9)24]JzTx-V(1-29) | {H}-YCQKWMWTCDSKRACCE |
| | | GLECKL[Atz(PEG10)CRKI |
| | | I-{Amide} |
| 185 | [Glu20;Pra(NPeg9)26]JzTx-V(1-29) | {H}-YCQKWMWTCDSKRACCE |
| | | GLECKLWC[Atz(PEG10)KI |
| | | I-{Amide} |
| 186 | [Glu20;Pra(NPeg9)27]JzTx-V(1-29) | {H}-YCQKWMWTCDSKRACCE |
| | | GLECKLWCR[Atz(PEG10)I |
| | | I-{Amide} |
| 187 | [Glu20;Pra(NPeg9)28]JzTx-V(1-29) | {H}-YCQKWMWTCDSKRACCE |
| | | GLECKLWCRK[Atz(PEG10) |
| | | I-{Amide} |
| 188 | [Glu20;Pra(NPeg9)29]JzTx-V(1-29) | {H}-YCQKWMWTCDSKRACCE |
| | | GLECKLWCRKI |
| | | {Atz(PEG10)-{Amide} |
| 189 | [Nle6;Glu20;Tyr28]JzTx-V(1-29) | {H}-YCQKW[Nle]WTCDSKR |
| | | ACCEGLECKLWCRKYI- |
| | | {Amide} |
| 190 | [1-Nal5;Glu20;Tyr28]JzTx-V(1-29) | {H}-YCQK[1-Nal]MWTCDS |
| | | KRACCEGLECKLWCRKYI- |
| | | {Amide} |
| 191 | [2-Nal5;Glu20;Tyr28]JzTx-V(1-29) | {H}-YCQK[2-Nal]MWTCDS |
| | | KRACCEGLECKLWCRKYI- |
| | | {Amide} |
| 192 | [pI-Phe5;Glu20;Tyr28]JzTx-V(1-29) | {H}-YCQK[pI-Phe]MWTCD |
| | | SKRACCEGLECKLWCRKYI- |
| | | {Amide} |
| 193 | [Phe5;Glu20;Tyr28]JzTx-V(1-29) | {H}-YCQKFMWTCDSKRACCE |
| | | GLECKLWCRKYI-{Amide} |
| 194 | [Tyr5,28;Glu20]JzTx-V(1-29) | {H}-YCQKYMWTCDSKRACCE |
| | | GLECKLWCRKYI-{Amide} |
| 195 | [Val5;Glu20;Tyr28]JzTx-V(1-29) | {H}-YCQKVMWTCDSKRACCE |
| | | GLECKLWCRKYI-{Amide} |
| 196 | [Leu5;Glu20;Tyr28]JzTx-V(1-29) | {H}-YCQKLMWTCDSKRACCE |
| | | GLECKLWCRKYI-{Amide} |
| 197 | [Nle5;Glu20;Tyr28]JzTx-V(1-29) | {H}-YCQK[Nle]MWTCDSKR |
| | | ACCEGLECKLWCRKYI- |
| | | {Amide} |
| 198 | [Nva5;Glu20;Tyr28]JzTx-V(1-29) | {H}-YCQK[Nva]MWTCDSKR |
| | | ACCEGLECKLWCRKYI- |
| | | {Amide} |
| 199 | [Cit5;Glu20;Tyr28]JzTx-V(1-29) | {H}-YCQK[Cit]MWTCDSKR |
| | | ACCEGLECKLWCRKYI- |
| | | {Amide} |
| 200 | [Lys5;Glu20;Tyr28]JzTx-V(1-29) | {H}-YCQKKMWTCDSKRACCE |
| | | GLECKLWCRKYI-{Amide} |
| 201 | [Asn5;Glu20;Tyr28]JzTx-V(1-29) | {H}-YCQKNMWTCDSKRACCE |
| | | GLECKLWCRKYI-{Amide} |
| 202 | [Ser5;Glu20;Tyr28]JzTx-V(1-29) | {H}-YCQKSMWTCDSKRACCE |
| | | GLECKLWCRKYI-{Amide} |
| 203 | [Glu5,20;Tyr28]JzTx-V(1-29) | {H}-YCQKEMWTCDSKRACCE |
| | | GLECKLWCRKYI-{Amide} |
| 204 | [1-Nal7;Glu20;Tyr28]JzTx-V(1-29) | {H}-YCQKWM[1-Nal]TCDS |
| | | KRACCEGLECKLWCRKYI- |
| | | {Amide} |
| 205 | [2-Nal7;Glu20;Tyr28]JzTx-V(1-29) | {H}-YCQKWM[2-Nal]TCDS |
| | | KRACCEGLECKLWCRKYI- |
| | | {Amide} |
| 206 | [pI-Phe7;Glu20;Tyr28]JzTx-V(1-29) | {H}-YCQKWM[pI-Phe]TCD |
| | | SKRACCEGLECKLWCRKYI- |
| | | {Amide} |
| 207 | [Phe7;Glu20;Tyr28]JzTx-V(1-29) | {H}-YCQKWMFTCDSKRACCE |
| | | GLECKLWCRKYI-{Amide} |
| 208 | [Tyr7,28;Glu20]JzTx-V(1-29) | {H}-YCQKWMYTCDSKRACCE |
| | | GLECKLWCRKYI-{Amide} |
| 209 | [Val7;Glu20;Tyr28]JzTx-V(1-29) | {H}-YCQKWMVTCDSKRACCE |
| | | GLECKLWCRKYI-{Amide} |
| 210 | [Leu7;Glu20;Tyr28]JzTx-V(1-29) | {H}-YCQKWMLTCDSKRACCE |
| | | GLECKLWCRKYI-{Amide} |
| 211 | [Nle7;Glu20;Tyr28]JzTx-V(1-29) | {H}-YCQKWM[Nle]TCDSKR |
| | | ACCEGLECKLWCRKYI- |
| | | {Amide} |
| 212 | [Nva7;Glu20;Tyr28]JzTx-V(1-29) | {H}-YCQKWM[Nva]TCDSKR |
| | | ACCEGLECKLWCRKYI- |
| | | {Amide} |
| 213 | [Cit7;Glu20;Tyr28]JzTx-V(1-29) | {H}-YCQKWM[Cit]TCDSKR |
| | | ACCEGLECKLWCRKYI- |
| | | {Amide} |
| 214 | [Lys7;Glu20;Tyr28]JzTx-V(1-29) | {H}-YCQKWMKTCDSKRACCE |
| | | GLECKLWCRKYI-{Amide} |
| 215 | [Asn7;Glu20;Tyr28]JzTx-V(1-29) | {H}-YCQKWMNTCDSKRACCE |
| | | GLECKLWCRKYI-{Amide} |
| 216 | [Ser7;Glu20;Tyr28]JzTx-V(1-29) | {H}-YCQKWMSTCDSKRACCE |
| | | GLECKLWCRKYI-{Amide} |
| 217 | [Glu7,20;Tyr28]JzTx-V(1-29) | {H}-YCQKWMETCDSKRACCE |
| | | GLECKLWCRKYI-{Amide} |
| 218 | [Glu20;1-Nal24;Tyr28]JzTx-V(1-29) | {H}-YCQKWMWTCDSKRACCE |
| | | GLECKL[1-Nal]CRKYI- |
| | | {Amide} |
| 219 | [Glu20;2-Nal24;Tyr28]JzTx-V(1-29) | {H}-YCQKWMWTCDSKRACCE |
| | | GLECKL[2-Nal]CRKYI- |
| | | {Amide} |
| 220 | [Glu20;pI-Phe24;Tyr28]JzTx-V(1-29) | {H}-YCQKWMWTCDSKRACCE |
| | | GLECKL[pI-Phe]CRKYI- |
| | | {Amide} |
| 221 | [Glu20;Phe24;Tyr28]JzTx-V(1-29) | {H}-YCQKWMWTCDSKRACCE |
| | | GLECKLFCRKYI-{Amide} |
| 222 | [Glu20;Tyr24,28]JzTx-V(1-29) | {H}-YCQKWMWTCDSKRACCE |
| | | GLECKLYCRKYI-{Amide} |
| 223 | [Glu20;Val24;Tyr28]JzTx-V(1-29) | {H}-YCQKWMWTCDSKRACCE |
| | | GLECKLVCRKYI-{Amide} |
| 224 | [Glu20;Leu24;Tyr28]JzTx-V(1-29) | {H}-YCQKWMWTCDSKRACCE |
| | | GLECKLLCRKYI-{Amide} |
| 225 | [Glu20;Nle24;Tyr28]JzTx-V(1-29) | {H}-YCQKWMWTCDSKRACCE |
| | | GLECKL[Nle]CRKYI- |
| | | {Amide} |
| 226 | [Glu20;Nva24;Tyr28]JzTx-V(1-29) | {H}-YCQKWMWTCDSKRACCE |
| | | GLECKL[Nva]CRKYI- |
| | | {Amide} |
| 227 | [Glu20;Cit24;Tyr28]JzTx-V(1-29) | {H}-YCQKWMWTCDSKRACCE |
| | | GLECKL[Cit]CRKYI- |
| | | {Amide} |
| 228 | [Glu20;Lys24;Tyr28]JzTx-V(1-29) | {H}-YCQKWMWTCDSKRACCE |
| | | GLECKLKCRKYI-{Amide} |
| 229 | [Glu20;Asn24;Tyr28]JzTx-V(1-29) | {H}-YCQKWMWTCDSKRACCE |
| | | GLECKLNCRKYI-{Amide} |
| 230 | [Glu20;Ser24;Tyr28]JzTx-V(1-29) | {H}-YCQKWMWTCDSKRACCE |
| | | GLECKLSCRKYI-{Amide} |
| 231 | [Glu20,24;Tyr28]JzTx-V(1-29) | {H}-YCQKWMWTCDSKRACCE |
| | | GLECKLECRKYI-{Amide} |
| 232 | [Glu20;Tyr28;1-Nal29]JzTx-V(1-29) | {H}-YCQKWMWTCDSKRACCE |
| | | GLECKLWCRKY[1-Nal]- |
| | | {Amide} |
| 233 | [Glu20;Tyr28;2-Nal29]JzTx-V(1-29) | {H}-YCQKWMWTCDSKRACCE |
| | | GLECKLWCRKY[2-Nal]- |
| | | {Amide} |
| 234 | [Glu20;Tyr28;pI-Phe29]JzTx-V(1-29) | {H}-YCQKWMWTCDSKRACCE |
| | | GLECKLWCRKY[pI-Phe]- |
| | | {Amide} |
| 235 | [Glu20;Tyr28;Phe29]JzTx-V(1-29) | {H}-YCQKWMWTCDSKRACCE |
| | | GLECKLWCRKYF-{Amide} |
| 236 | [Glu20;Tyr28,29]JzTx-V(1-29) | {H}-YCQKWMWTCDSKRACCE |
| | | GLECKLWCRKYY-{Amide} |
| 237 | [Glu20;Tyr28;Val29]JzTx-V(1-29) | {H}-YCQKWMWTCDSKRACCE |
| | | GLECKLWCRKYV-{Amide} |
| 238 | [Glu20;Tyr28;Leu29]JzTx-V(1-29) | {H}-YCQKWMWTCDSKRACCE |
| | | GLECKLWCRKYL-{Amide} |
| 239 | [Glu20;Tyr28;Nle29]JzTx-V(1-29) | {H}-YCQKWMWTCDSKRACCE |
| | | GLECKLWCRKY[Nle]- |
| | | {Amide} |
| 240 | [Glu20;Tyr28;Nva29]JzTx-V(1-29) | {H}-YCQKWMWTCDSKRACCE |
| | | GLECKLWCRKY[Nva]- |
| | | {Amide} |
| 241 | [Glu20;Tyr28;Cit29]JzTx-V(1-29) | {H}-YCQKWMWTCDSKRACCE |
| | | GLECKLWCRKY[Cit]- |
| | | {Amide} |
| 242 | [Glu20;Tyr28;Lys29]JzTx-V(1-29) | {H}-YCQKWMWTCDSKRACCE |
| | | GLECKLWCRKYK-{Amide} |
| 243 | [Glu20;Tyr28;Asn29]JzTx-V(1-29) | {H}-YCQKWMWTCDSKRACCE |
| | | GLECKLWCRKYN-{Amide} |
| 244 | [Glu20;Tyr28;Ser29]JzTx-V(1-29) | {H}-YCQKWMWTCDSKRACCE |
| | | GLECKLWCRKYS-{Amide} |
| 245 | [Glu20,29;Tyr28]JzTx-V(1-29) | {H}-YCQKWMWTCDSKRACCE |
| | | GLECKLWCRKYE-{Amide} |
| 246 | [Glu20;Tyr28;Trp29]JzTx-V(1-29) | {H}-YCQKWMWTCDSKRACCE |
| | | GLECKLWCRKYW-{Amide} |
| 247 | Atz(PEG10)-[Nle6]JzTx-V(1-29) | {H}-[Atz(PEG10)YCQKW |
| | | [Nle]WTCDSKRACCEGLRCK |
| | | LWCRKII-{Amide} |
| 248 | [Atz(PEG10)1;Nle6]JzTx-V(1-29) | {H}-[Atz(PEG10)CQKW |
| | | [Nle]WTCDSKRACCEGLRCK |
| | | LWCRKII-{Amide} |
| 249 | [Atz(PEG10)3;Nle6]JzTx-V(1-29) | {H}-YC[Atz(PEG10)KW |
| | | [Nle]WTCDSKRACCEGLRCK |
| | | LWCRKII-{Amide} |
| 250 | [Atz(PEG10)4;Nle6]JzTx-V(1-29) | {H}-YCQ[Atz(PEG10)W |
| | | [Nle]WTCDSKRACCEGLRCK |
| | | LWCRKII-{Amide} |
| 251 | [Atz(PEG10)5;Nle6]JzTx-V(1-29) | {H}-YCQK[Atz(PEG10) |
| | | [Nle]WTCDSKRACCEGLRCK |
| | | LWCRKII-{Amide} |
| 252 | [Atz(PEG10)6]JzTx-V(1-29) | {H}-YCQKW[Atz(PEG10) |
| | | WTCDSKRACCEGLRCKLWCRK |
| | | II-{Amide} |
| 253 | [Nle6;Atz(PEG10)7]JzTx-V(1-29) | {H}-YCQKW[Nle] |
| | | [Atz(PEG10)TCDSKRACCE |
| | | GLRCKLWCRKII-{Amide} |
| 254 | [Nle6;Atz(PEG10)8]JzTx-V(1-29) | {H}-YCQKW[Nle]W |
| | | [Atz(PEG10)CDSKRACCEG |
| | | LRCKLWCRKII-{Amide} |
| 255 | [Nle6;Atz(PEG10)10]JzTx-V(1-29) | {H}-YCQKW[Nle]WTC |
| | | [Atz(PEG10)SKRACCEGLR |
| | | CKLWCRKII-{Amide} |
| 256 | [Nle6;Atz(PEG10)11]JzTx-V(1-29) | {H}-YCQKW[Nle]WTCD |
| | | [Atz(PEG10)KRACCEGLRC |
| | | KLWCRKII-{Amide} |
| 257 | [Nle6;Atz(PEG10)12]JzTx-V(1-29) | {H}-YCQKW[Nle]WTCDS |
| | | [Atz(PEG10)RACCEGLRCK |
| | | LWCRKII-{Amide} |
| 258 | [Nle6;Atz(PEG10)13]JzTx-V(1-29) | {H}-YCQKW[Nle]WTCDSK |
| | | [Atz(PEG10)ACCEGLRCKL |
| | | WCRKII-{Amide} |
| 259 | [Nle6;Atz(PEG10)14]JzTx-V(1-29) | {H}-YCQKW[Nle]WTCDSKR |
| | | [Atz(PEG10)CCEGLRCKLW |
| | | CRKII-{Amide} |
| 260 | [Nle6;Atz(PEG10)17]JzTx-V(1-29) | {H}-YCQKW[Nle]WTCDSKR |
| | | ACC[Atz(PEG10)GLRCKLW |
| | | CRKII-{Amide} |
| 261 | [Nle6;Atz(PEG10)18]JzTx-V(1-29) | {H}-YCQKW[Nle]WTCDSKR |
| | | ACCE[Atz(PEG10)LRCKLW |
| | | CRKII-{Amide} |
| 262 | [Nle6;Atz(PEG10)19]JzTx-V(1-29) | {H}-YCQKW[Nle]WTCDSKR |
| | | ACCEG[Atz(PEG10)RCKLW |
| | | CRKII-{Amide} |
| 263 | [Nle6;Atz(PEG10)20]JzTx-V(1-29) | {H}-YCQKW[Nle]WTCDSKR |
| | | ACCEGL[Atz(PEG10)CKLW |
| | | CRKII-{Amide} |
| 264 | [Nle6;Atz(PEG10)22]JzTx-V(1-29) | {H}-YCQKW[Nle]WTCDSKR |
| | | ACCEGLRC[Atz(PEG10)LW |
| | | CRKII-{Amide} |
| 265 | [Nle6;Atz(PEG10)23]JzTx-V(1-29) | {H}-YCQKW[Nle]WTCDSKR |
| | | ACCEGLRCK[Atz(PEG10)W |
| | | CRKII-{Amide} |
| 266 | [Nle6;Atz(PEG10)24]JzTx-V(1-29) | {H}-YCQKW[Nle]WTCDSKR |
| | | ACCEGLRCKL[Atz(PEG10) |
| | | CRKII-{Amide} |
| 267 | [Nle6;Atz(PEG10)26]JzTx-V(1-29) | {H}-YCQKW[Nle]WTCDSKR |
| | | ACCEGLRCKLWC[Atz |
| | | (PEG10)KII-{Amide} |
| 268 | [Nle6;Atz(PEG10)27]JzTx-V(1-29) | {H}-YCQKW[Nle}WTCDSKR |
| | | ACCEGLRCKLWCR[Atz |
| | | (PEG10)II-{Amide} |
| 269 | [Nle6;Atz(PEG10)28]JzTx-V(1-29) | {H}-YCQKW[Nle]WTCDSKR |
| | | ACCEGLRCKLWCRK[Atz |
| | | (PEG10)I-{Amide} |
| 270 | [Nle6;Atz(PEG10)29]JzTx-V(1-29) | {H}-YCQKW[Nle]WTCDSKR |
| | | ACCEGLRCKLWCRKI[Atz |
| | | (PEG10)-{Amide} |
| 271 | [Nle6]JzTx-V(1-29)-Atz(PEG10) | {H}-YCQKW[Nle]WTCDSKR |
| | | ACCEGLRCKLWCRKII[Atz |
| | | (PEG10)-{Amide} |
| 272 | [Nle6]JzTx-V(1-29) | {H}-YCQKW[Nle]WTCDSKR |
| | | ACCEGLRCKLWCRKII- |
| | | {Amide} |
| 273 | [Nle6;Glu20]JzTx-V(1-29) | {H}-YCQKW[Nle]WTCDSKR |
| | | ACCEGLECKLWCRKII- |
| | | {Amide} |
| 274 | [Nle6;Glu20;Trp29]JzTx-V(1-29) | {H}-YCQKW[Nle]WTCDSKR |
| | | ACCEGLECKLWCRKIW- |
| | | {Amide} |
| 275 | [Nle6;Glu20;Ser28]JzTx-V(1-29) | {H}-YCQKW[Nle]WTCDSKR |
| | | ACCEGLECKLWCRKSI- |
| | | {Amide} |
| 276 | [Glu20;Ser28;Trp29]JzTx-V(1-29) | {H}-YCQKWMWTCDSKRACCE |
| | | GLECKLWCRKSW-{Amide} |
| 277 | [Glu1,20;Tyr28]JzTx-V(1-29) | {H}-ECQKWMWTCDSKRACCE |
| | | GLECKLWCRKYI-{Amide} |
| 278 | [Glu1;Tyr28]JzTx-V(1-29) | {H}-ECQKWMWTCDSKRACCE |
| | | GLRCKLWCRKYI-{Amide} |
| 279 | [Glu1,20;Tyr28;Trp29]JzTx-V(1-29) | {H}-ECQKWMWTCDSKRACCE |
| | | GLECKLWCRKYW-{Amide} |
| 280 | [Glu1;Tyr28;Trp29]JzTx-V(1-29) | {H}-ECQKWMWTCDSKRACCE |
| | | GLRCKLWCRKYW-{Amide} |
| 281 | [Glu1;1-Nal7]JzTx-V(1-29) | {H}-ECQKWM[1-Nal]TCDS |
| | | KRACCEGLRCKLWCRKII- |
| | | {Amide} |
| 282 | [Glu1;1-Nal7;Trp29]JzTx-V(1-29) | {H}-ECQKWM[1-Nal]TCDS |
| | | KRACCEGLRCKLWCRKII- |
| | | {Amide} |
| 283 | [Nle6,Pra14]JzTx-V(1-29) | {H}-YCQKW[Nle]WTCDSKR |
| | | [Pra]CCEGLRCKLWCRKII- |
| | | {Amide} |
| 284 | [Nle6;Pra17;Glu20;Trp29]JzTx-V(1-29) | {H}-YCQKW[Nle]WTCDSKR |
| | | ACC[Pra]GLECKLWCRKIW- |
| | | {Amide} |
| 285 | [Nle6;Lys14;Glu20;Trp29]JzTx-V(1-29) | {H}-YCQKW[Nle]WTCDSK |
| | | (ivDde)RKCCEGLECKLWCR |
| | | KIW-{Amide} |
| 286 | [Nle6;Lys(Pra-Ahx)14;Glu20;Trp29] | {H}-YCQKW[Nle]WTCDSKR |
| | JzTx-V(1-29) | K(Pra-Ahx)CCEGLECKLWC |
| | | RKIW-{Amide} |
| 287 | [Nle6;Lys(Pra)14;Glu20;Trp29] | {H}-YCQKW[Nle]WTCDSKR |
| | JzTx-V(1-29) | K(Pra)CCEGLECKLWCRKI |
| | | W-{Amide} |
| 288 | [Nle6;Lys14;Glu20;Trp29]JzTx-V(1-29) | {H}-YCQKW[Nle]WTCDSKR |
| | | K(ivDde)CCEGLECKLWCRK |
| | | IW-{Amide} |
| 289 | [Nle6;Lys17;Glu20;Trp29]JzTx-V(1-29) | {H}-YCQKW[Nle]WTCDSKR |
| | | ACCK(ivDde)GLECKLWCRK |
| | | IW-{Amide} |
| 290 | [Nle6;Lys(Pra-NPEG11)14;Glu20;Trp29] | {H}-YCQKW[Nle]WTCDSKR |
| | JzTx-V(1-29) | [KPPG11]CCEGLECKLWCRK |
| | | IW-{Amide} |
| 291 | [Nle6;Lys(Pra-NPEG3)14;Glu20;Trp29] | {H}-YCQKW[Nle]WTCDSKR |
| | JzTx-V(1-29) | [KPPG3]CCEGLECKLWCRKI |
| | | W-{Amide} |
| 292 | [Nle6;Lys(Pra-NPEG11)17;Glu20;Trp29] | {H}-YCQKW[Nle]WTCDSKR |
| | JzTx-V(1-29) | ACC[KPPG11]GLECKLWCRK |
| | | IW-{Amide} |
| 293 | [Nle6;Lys(Pra-NPEG3)17;Glu20;Trp29] | {H}-YCQKW[Nle]WTCDSKR |
| | JzTx-V(1-29) | ACC[KPPG3]GLECKLWCRKI |
| | | W-{Amide} |
| 294 | [Nle6;Glu20;Trp29]JzTx-V(1-29) | {H}-YCQKW[Nle]WTCDSKR |
| | | ACCEGLECKLWCRKIW- |
| | | {Amide} |
| 295 | Pra-[Glu20;Trp29]JzTx-V(1-29) | {H}-[Pra]YCQKWMWTCDSK |
| | | RACCEGLECKLWCRKIW- |
| | | {Amide} |
| 296 | Pra-[Nle6;Trp29]JzTx-V(1-29) | {H}-[Pra]YCQKW[Nle]WT |
| | | CDSKRACCEGLRCKLWCRKI |
| | | W-{Amide} |
| 297 | Pra-[Nle6;Glu20] JzTx-V(1-29) | {H}-[Pra]YCQKW[Nle]WT |
| | | CDSKRACCEGLECKLWCRKI |
| | | I-{Amide} |
| 298 | Pra-[Phe6;Glu20;Trp29]JzTx-V(1-29) | {H}-[Pra]YCQKWFWTCDSK |
| | | RACCEGLECKLWCRKIW- |
| | | {Amide} |
| 299 | Pra-[Leu6;Glu20;Trp29]JzTx-V(1-29) | {H}-[Pra]YCQKWLWTCDSK |
| | | RACCEGLECKLWCRKIW- |
| | | {Amide} |
| 300 | Pra-[Nva6;Glu20;Trp29]JzTx-V(1-29) | {H}-[Pra]YCQKW[Nva]WT |
| | | CDSKRACCEGLECKLWCRKI |
| | | W-{Amide} |
| 301 | Pra-[Nle6;Glu20;Phe29]JzTx-V(1-29) | {H}-[Pra]YCQKW[Nle]WT |
| | | CDSKRACCEGLECKLWCRKI |
| | | F-{Amide} |
| 302 | [Nle6;Pra11;Glu20;Trp29]JzTx-V(1-29) | {H}-YCQKW[Nle]WTCD |
| | | [Pra]KRACCEGLECKLWCRK |
| | | IW-{Amide} |
| 303 | AzK-[Nle6;Glu20;Trp29]JzTx-V(1-29) | {H}-[AzK]YCQKW[Nle]WT |
| | | CDSKRACCEGLECKLWCRKI |
| | | W-{Amide} |
| 304 | [AzK1 ;Nle6;Glu20;Trp29]JzTx-V(1-29) | {H}-[AzK]CQKW[Nle]WTC |
| | | DSKRACCEGLECKLWCRKIW- |
| | | {Amide} |
| 305 | [Nle6;AzK11;Glu20;Trp29]JzTx-V(1-29) | {H}-YCQKW[Nle]WTCD |
| | | [AzK]KRACCEGLECKLWCRK |
| | | IW-{Amide} |
| 306 | [Nle6;AzK14;Glu20;Trp29]JzTx-V(1-29) | {H}-YCQKW[Nle]WTCDSKR |
| | | [AzK]CCEGLECKLWCRKIW- |
| | | {Amide} |
| 307 | [Nle6;AzK17;Glu20;Trp29]JzTx-V(1-29) | {H}-YCQKW[Nle]WTCDSKR |
| | | ACC[AzK]GLECKLWCRKIW- |
| | | {Amide} |
| 308 | Aha-[Nle6;Glu20;Trp29]JzTx-V(1-29) | {H}-[Aha]YCQKW[Nle]WT |
| | | CDSKRACCEGLECKLWCRKI |
| | | W-{Amide} |
| 309 | [Aha1;Nle6;Glu20;Trp29]JzTx-V(1-29) | {H}-[Aha]CQKW[Nle]WTC |
| | | DSKRACCEGLECKLWCRKIW- |
| | | {Amide} |
| 310 | [Nle6;Aha11;Glu20;Trp29]JzTx-V(1-29) | {H}-YCQKW[Nle]WTCD |
| | | [Aha]KRACCEGLECKLWCRK |
| | | IW-{Amide} |
| 311 | [Nle6;Aha14;Glu20;Trp29]JzTx-V(1-29) | {H}-YCQKW[Nle]WTCDSKR |
| | | [Aha]CCEGLECKLWCRKIW- |
| | | {Amide} |
| 312 | [Nle6;Aha17;Glu20;Trp29]JzTx-V(1-29) | {H}-YCQKW[Nle]WTCDSKR |
| | | ACC[Aha]GLECKLWCRKIW- |
| | | {Amide} |
| 313 | Pra-[Nle6;Glu20;Tyr28]JzTx-V(1-29) | {H}-[Pra]YCQKW[Nle]WT |
| | | CDSKRACCEGLECKLWCRKY |
| | | I-{Amide} |
| 314 | [Pra1;Nle6;Glu20;Tyr28]JzTx-V(1-29) | {H}-[Pra]CQKW[Nle]WTC |
| | | DSKRACCEGLECKLWCRKYI- |
| | | {Amide} |
| 315 | [Nle6;Pra11;Glu20;Tyr28]JzTx-V(1-29) | {H}-YCQKW[Nle]WTCD |
| | | [Pra]KRACCEGLECKLWCRK |
| | | YI-{Amide} |
| 316 | [Nle6;Pra14;Glu20;Tyr28]JzTx-V(1-29) | {H}-YCQKW[Nle]WTCDSKR |
| | | [Pra]CCEGLECKLWCRKYI- |
| | | {Amide} |
| 317 | [Nle6;Pra17;Glu20;Tyr28]JzTx-V(1-29) | {H}-YCQKW[Nle]WTCDSKR |
| | | ACC[Pra]GLECKLWCRKYI- |
| | | {Amide} |
| 318 | AzK-[Nle6;Glu20;Tyr28]JzTx-V(1-29) | {H}-[AzK]YCQKW[Nle]WT |
| | | CDSKRACCEGLECKLWCRKY |
| | | I-{Amide} |
| 319 | [AzK1;Nle6;Glu20;Tyr28]JzTx-V(1-29) | {H}-[AzK]CQKW[Nle]WTC |
| | | DSKRACCEGLECKLWCRKYI- |
| | | {Amide} |
| 320 | [Nle6;AzK11;Glu20;Tyr28]JzTx-V(1-29) | {H}-YCQKW[Nle]WTCD |
| | | [AzK]KRACCEGLECKLWCRK |
| | | YI-{Amide} |
| 321 | [Nle6;AzK14;Glu20;Tyr28]JzTx-V(1-29) | {H}-YCQKW[Nle]WTCDSKR |
| | | [AzK]CCEGLECKLWCRKYI- |
| | | {Amide} |
| 322 | [Nle6;AzK17;Glu20;Tyr28]JzTx-V(1-29) | {H}-YCQKW[Nle]WTCDSKR |
| | | ACC[AzK]GLECKLWCRKYI- |
| | | {Amide} |
| 323 | Aha-[Nle6;Glu20;Tyr28]JzTx-V(1-29) | {H}-[Aha]YCQKW[Nle]WT |
| | | CDSKRACCEGLECKLWCRKY |
| | | I-{Amide} |
| 324 | [Aha1;Nle6;Glu20;Tyr28]JzTx-V(1-29) | {H}-[Aha]CQKW[Nle]WTC |
| | | DSKRACCEGLECKLWCRKYI- |
| | | {Amide} |
| 325 | [Nle6;Aha11;Glu20;Tyr28]JzTx-V(1-29) | {H}-YCQKW[Nle]WTCD |
| | | [Aha]KRACCEGLECKLWCRK |
| | | YI-{Amide} |
| 326 | [Nle6;Aha14;Glu20;Tyr28]JzTx-V(1-29) | {H}-YCQKW[Nle]WTCDSKR |
| | | [Aha]CCEGLECKLWCRKYI- |
| | | {Amide} |
| 327 | [Nle6;Aha17;Glu20;Tyr28]JzTx-V(1-29) | {H}-YCQKW[Nle]WTCDSKR |
| | | ACC[Aha]GLECKLWCRKYI- |
| | | {Amide} |
| 328 | Pra-[Nle6;Glu28]JzTx-V(1-29) | {H}-[Pra]YCQKW[Nle]WT |
| | | CDSKRACCEGLRCKLWCRKE |
| | | I-{Amide} |
| 329 | [Pra1;Nle6;Glu28]JzTx-V(1-29) | {H}-[Pra]CQKW[Nle]WTC |
| | | DSKRACCEGLRCKLWCRKEI- |
| | | {Amide} |
| 330 | [Nle6;Pra11;Glu28]JzTx-V(1-29) | {H}-YCQKW[Nle]WTCD |
| | | [Pra]KRACCEGLRCKLWCRK |
| | | EI-{Amide} |
| 331 | [Nle6;Pra14;Glu28]JzTx-V(1-29) | {H}-YCQKW[Nle]WTCDSKR |
| | | [Pra]CCEGLRCKLWCRKEI- |
| | | {Amide} |
| 332 | [Nle6;Pra17;Glu28]JzTx-V(1-29) | {H}-YCQKW[Nle]WTCDSKR |
| | | ACC[Pra]GLRCKLWCRKEI- |
| | | {Amide} |
| 333 | AzK-[Nle6;Glu28]JzTx-V(1-29) | {H}-[AzK]YCQKW[Nle]WT |
| | | CDSKRACCEGLRCKLWCRKE |
| | | I-{Amide} |
| 334 | [AzK1;Nle6;Glu28]JzTx-V(1-29) | {H}-[AzK]CQKW[Nle]WTC |
| | | DSKRACCEGLRCKLWCRKEI- |
| | | {Amide} |
| 335 | [Nle6;AzK11;Glu28]JzTx-V(1-29) | {H}-YCQKW[Nle]WTCD |
| | | [AzK]KRACCEGLRCKLWCRK |
| | | EI-{Amide} |
| 336 | [Nle6;AzK14;Glu28]JzTx-V(1-29) | {H}-YCQKW[Nle]WTCDSKR |
| | | [AzK]CCEGLRCKLWCRKEI- |
| | | {Amide} |
| 337 | [Nle6;AzK17;Glu28]JzTx-V(1-29) | {H}-YCQKW[Nle]WTCDSKR |
| | | ACC[AzK]GLRCKLWCRKEI- |
| | | {Amide} |
| 338 | Aha-[Nle6;Glu28]JzTx-V(1-29) | {H}-[Aha]YCQKW[Nle]WT |
| | | CDSKRACCEGLRCKLWCRKE |
| | | I-{Amide} |
| 339 | [Aha1;Nle6;Glu28]JzTx-V(1-29) | {H}-[Aha]CQKW[Nle]WTC |
| | | DSKRACCEGLRCKLWCRKEI- |
| | | {Amide} |
| 340 | [Nle6;Aha11;Glu28]JzTx-V(1-29) | {H}-YCQKW[Nle]WTCD |
| | | [Aha]KRACCEGLRCKLWCRK |
| | | EI-{Amide} |
| 341 | [Nle6;Aha14;Glu28]JzTx-V(1-29) | {H}-YCQKW[Nle]WTCDSKR |
| | | [Aha]CCEGLRCKLWCRKEI- |
| | | {Amide} |
| 342 | [Nle6;Aha17;Glu28]JzTx-V(1-29) | {H}-YCQKW[Nle]WTCDSKR |
| | | ACC[Aha]GLRCKLWCRKEI- |
| | | {Amide} |
| 343 | [Pra1;Nle6;Glu20]JzTx-V(1-29) | {H}-[Pra]CQKW[Nle]WTC |
| | | DSKRACCEGLECKLWCRKII- |
| | | {Amide} |
| 344 | [Nle6;Pra11;Glu20]JzTx-V(1-29) | {H}-YCQKW[Nle]WTCD |
| | | [Pra]KRACCEGLECKLWCRK |
| | | II-{Amide} |
| 345 | [Nle6;Pra14;Glu20]JzTx-V(1-29) | {H}-YCQKW[Nle]WTCDSKR |
| | | [Pra]CCEGLECKLWCRKII- |
| | | {Amide} |
| 346 | [Nle6;Pra17;Glu20]JzTx-V(1-29) | {H}-YCQKW[Nle]WTCDSKR |
| | | ACC[Pra]GLECKLWCRKII- |
| | | {Amide} |
| 347 | AzK-Nle6;Glu20]JzTx-V(1-29) | {H}-[AzK]YCQKW[Nle]WT |
| | | CDSKRACCEGLECKLWCRMI- |
| | | {Amide} |
| 348 | [AzK1;Nle6;Glu20]JzTx-V(1-29) | {H}-[AzK]CQKW[Nle]WTC |
| | | DSKRACCEGLECKLWCRKII- |
| | | {Amide} |
| 349 | [Nle6;AzK11;Glu20]JzTx-V(1-29) | {H}-YCQKW[Nle]WTCD |
| | | [AzK]KRACCEGLECKLWCRK |
| | | II-{Amide} |
| 350 | [Nle6;AzK14;Glu20]JzTx-V(1-29) | {H}-YCQKW[Nle]WTCDSKR |
| | | [AzK]CCEGLECKLWCRKII- |
| | | {Amide} |
| 351 | [Nle6;AzK17;Glu20]JzTx-V(1-29) | {H}-YCQKW[Nle]WTCDSKR |
| | | ACC[AzK]GLECKLWCRKII- |
| | | {Amide} |
| 352 | Aha-[Nle6;Glu20]JzTx-V(1-29) | {H}-[Aha]YCQKW[Nle]WT |
| | | CDSKRACCEGLECKLWCRKI |
| | | I-{Amide} |
| 353 | [Aha1;Nle6; Glu20] JzTx-V(1-29) | {H}-[Aha]CQKW[Nle]WTC |
| | | DSKRACCEGLECKLWCRKII- |
| | | {Amide} |
| 354 | [Nle6;Aha11;Glu20]JzTx-V(1-29) | {H}-YCQKW[Nle]WTCD |
| | | [Aha]KRACCEGLECKLWCRK |
| | | II-{Amide} |
| 355 | [Nle6;Aha14;Glu20]JzTx-V(1-29) | {H}-YCQKW[Nle]WTCDSKR |
| | | [Aha]CCEGLECKLWCRKII- |
| | | {Amide} |
| 356 | [Nle6;Aha17;Glu20]JzTx-V(1-29) | {H}-YCQKW[Nle]WTCDSKR |
| | | ACC[Aha]GLECKLWCRKII- |
| | | {Amide] |
| 357 | Ala-[Nle6]JzTx-V(1-29) | {H}-AYCQKW[Nle]WTCDSK |
| | | RACCEGLRCKLWCRKII- |
| | | {Amide} |
| 358 | Phe-[Nle6]JzTx-V(1-29) | {H}-FYCQKW[Nle]WTCDSK |
| | | RACCEGLRCKLWCRKII- |
| | | {Amide} |
| 359 | Gly-[Nle6]JzTx-V(1-29) | {H}-GYCQKW[Nle]WTCDSK |
| | | RACCEGLRCKLWCRKII- |
| | | {Amide} |
| 360 | Ile-[Nle6]JzTx-V(1-29) | {H}-IYCQKW[Nle]WTCDSK |
| | | RACCEGLRCKLWCRKII- |
| | | {Amide} |
| 361 | Leu-[Nle6]JzTx-V(1-29) | {H}-LYCQKW[Nle]WTCDSK |
| | | RACCEGLRCKLWCRKII- |
| | | {Amide} |
| 362 | Pro-[Nle6]JzTx-V(1-29) | {H}-PYCQKW[Nle]WTCDSK |
| | | RACCEGLRCKLWCRKII- |
| | | {Amide} |
| 363 | Val-[Nle6]JzTx-V(1-29) | {H}-VYCQKW[Nle]WTCDSK |
| | | RACCEGLRCKLWCRKII- |
| | | {Amide} |
| 364 | Trp-[Nle6]JzTx-V(1-29) | {H}-WYCQKW[Nle]WTCDSK |
| | | RACCEGLRCKLWCRKII- |
| | | {Amide} |
| 365 | Tyr-[Nle6]JzTx-V(1-29) | {H}-YYCQKW[Nle]WTCDSK |
| | | RACCEGLRCKLWCRKII- |
| | | {Amide} |
| 366 | CyA-[Nle6]JzTx-V(1-29) | {H}-[CyA]YCQKW[Nle]WT |
| | | CDSKRACCEGLRCKLWCRKI |
| | | I-{Amide} |
| 367 | AllylG-[Nle6]JzTx-V(1-29) | {H}-[AllylG]YCQKW |
| | | [Nle]WTCDSKRACCEGLRCK |
| | | LWCRKII-{Amide} |
| 368 | Abu-[Nle6]JzTx-V(1-29) | {H}-[Abu]YCQKW[Nle]WT |
| | | CDSKRACCEGLRCKLWCRKI |
| | | I-{Amide} |
| 369 | Nva-[Nle6]JzTx-V(1-29) | {H}-[Nva]YCQKW[Nle]WT |
| | | CDSKRACCEGLRCKLWCRKI |
| | | I-{Amide} |
| 370 | Nle-[Nle6]JzTx-V(1-29) | {H}-[Nle]YCQKW[Nle]WT |
| | | CDSKRACCEGLRCKLWCRKI |
| | | I-{Amide} |
| 371 | OctylG-[Nle6]JzTx-V(1-29) | {H}-[OctylG]YCQKW |
| | | [Nle]WTCDSKRACCEGLRCK |
| | | LWCRKII- {Amide} |
| 372 | D-Ala-[Nle6]JzTx-V(1-29) | {H}-aYCQKW[Nle]WTCDSK |
| | | RACCEGLRCKLWCRKII- |
| | | {Amide} |
| 373 | D-Leu-[Nle6]JzTx-V(1-29) | {H}-lYCQKW[Nle]WTCDSK |
| | | RACCEGLRCKLWCRKII- |
| | | {Amide} |
| 374 | D-Phe-[Nle6]JzTx-V(1-29) | {H}-fYCQKW[Nle]WTCDSK |
| | | RACCEGLRCKLWCRKII- |
| | | {Amide} |
| 375 | Sar-[Nle6]JzTx-V(1-29) | {H}-[Sar]YCQKW[Nle]WT |
| | | CDSKRACCEGLRCKLWCRKI |
| | | I-{Amide} |
| 376 | bAla-[Nle6]JzTx-V(1-29) | {H}-[bAla]YCQKW[Nle]W |
| | | TCDSKRACCEGLRCKLWCRKI |
| | | I-{Amide} |
| 377 | hLeu-[Nle6]JzTx-V(1-29) | {H}-[hLeu]YCQKW[Nle}W |
| | | TCDSKRACCEGLRCKLWCRKI |
| | | I-{Amide} |
| 378 | 4-Cl-F-[Nle6]JzTx-V(1-29) | {H}-[4-Cl-F]YCQKW |
| | | [Nle]WTCDSKRACCEGLRCK |
| | | LWCRKII-{Amide} |
| 379 | hPhe-[Nle6]JzTx-V(1-29) | {H}-[hPhe]YCQKW[Nle]W |
| | | TCDSKRACCEGLRCKLWCRKI |
| | | I-{Amide} |
| 380 | CyA-[Nle6,Lys(Pra-NPEG3)14]JzTx-V(1-29) | {H}-[CyA]YCQKW[Nle]WT |
| | | CDSKR[KPPG3]CCEGLRCKL |
| | | WCRKII-{Amide} |
| 381 | AllylG-[Nle6,Lys(Pra-NPEG3)14] | {H}-[AllylG]YCQKW |
| | JzTx-V(1-29) | [Nle]WTCDSKR[KPPG3]CC |
| | | EGLRCKLWCRKII-{Amide} |
| 382 | Abu-[Nle6,Lys(Pra-NPEG3)14]JzTx-V(1-29) | {H}-[Abu]YCQKW[Nle]WT |
| | | CDSKR[KPPG3]CCEGLRCKL |
| | | WCRKII-{Amide} |
| 383 | Nva-[Nle6,Lys(Pra-NPEG3)14]JzTx-V(1-29) | {H}-[Nva]YCQKW[Nle]WT |
| | | CDSKR[KPPG3]CCEGLRCKL |
| | | CRKII-{Amide} |
| 384 | Pra-[Nle6,Lys(Pra-NPEG3)14]JzTx-V(1-29) | {H}-[Pra]YCQKW[Nle]WT |
| | | CDSKR[KPPG3]CCEGLRCKL |
| | | WCRKII-{Amide} |
| 385 | CyA-[Nle6,Lys(Pra-NPEG3)17]JzTx-V(1-29) | {H}-[CyA]YCQKW[Nle]WT |
| | | CDSKRACC[KPPG3]GLRCKL |
| | | WCRKII-{Amide} |
| 386 | Pra-[Nle6,Lys(Pra-NPEG3)17]JzTx-V(1-29) | {H}-[Pra]YCQKW[Nle]WT |
| | | CDSKRACC[KPPG3]GLRCKL |
| | | WCRKII-{Amide} |
| 387 | Pra-[Nle6,Pra17]JzTx-V(1-29) | {H}-[Pra]YCQKW[Nle]WT |
| | | CDSKRACC[Pra]GLRCKLWC |
| | | RKII-{Amide} |
| 388 | CyA-[Nle6,Pra17]JzTx-V(1-29) | {H}-[CyA]YCQKW[Nle]WT |
| | | CDSKRACC[Pra]GLRCKLWC |
| | | RKII-{Amide} |
| 389 | CyA-[Nle6,Pra11]JzTx-V(1-29) | {H}-[CyA]YCQKW[Nle]WT |
| | | CD[Pra]KRACCEGLRCKLWC |
| | | RKII-{Amide} |
| 390 | Pra-[Nle6,Pra11]JzTx-V(1-29) | {H}-[Pra]YCQKW[Nle]WT |
| | | CD[Pra]KRACCEGLRCKLWC |
| | | RKII-{Amide} |
| 391 | CyA-[Pra1,Nle6]JzTx-V(1-29) | {H}-[CyA][Pra]CQKW |
| | | [Nle]WTCDSKRACCEGLRCK |
| | | LWCRKII-{Amide} |
| 392 | CyA-[Nle6,Lys(Pra)14,Glu28]JzTx-V(1-29) | {H}-[CyA]YCQKW[Nle]WT |
| | | CDSKRK(Pra)CCEGLRCKLW |
| | | CRKEI-{Amide} |
| 393 | CyA-[Nle6,Lys(Pra)14,Glu20]JzTx-V(1-29) | {H}-[CyA]YCQKW[Nle]WT |
| | | CDSKRK(Pra)CCEGLECKLW |
| | | CRKII-{Amide} |
| 394 | CyA-[Nle6,Lys(Pra)14,Glu20,Tyr28] | {H}-[CyA]YCQKW[Nle]WT |
| | JzTx-V(1-29) | CDSKRK(Pra)CCEGLECKLW |
| | | CRKYI-{Amide} |
| 395 | CyA-[Nle6,Pra17,Glu28]JzTx-V(1-29) | {H}-[CyA]YCQKW[Nle]WT |
| | | CDSKRACC[Pra]GLRCKLWC |
| | | RKEI-{Amide} |
| 396 | CyA-[Nle6,Pra17,Glu20]JzTx-V(1-29) | {H}-[CyA]YCQKW[Nle]WT |
| | | CDSKRACC[Pra]GLECKLWC |
| | | RKII-{Amide} |
| 397 | CyA-[Nle6,Pra17,Glu20,Tyr28]JzTx-V(1-29) | {H}-[CyA]YCQKW[Nle]WT |
| | | CDSKRACC[Pra]GLECKLWC |
| | | RKYI-{Amide} |
| 398 | CyA-[Nle6,Lys(Pra)14]JzTx-V(1-29) | {H}-[CyA]YCQKW[Nle]WT |
| | | CDSKRK(Pra)CCEGLRCKLW |
| | | CRKII-{Amide} |
| 399 | AllylG-[Nle6,Lys(Pra)14]JzTx-V(1-29) | {H}-[AllylG]YCQKW |
| | | [Nle]WTCDSKRK(Pra)CCE |
| | | GLRCKLWCRKII-{Amide} |
| 400 | Abu-[Nle6,Lys(Pra)14]JzTx-V(1-29) | {H}-[Abu]YCQKW[Nle]WT |
| | | CDSKRK(Pra)CCEGLRCKLW |
| | | CRKII-{Amide} |
| 401 | Nva-[Nle6,Lys(Pra)14]JzTx-V(1-29) | {H}-[Nva]YCQKW[Nle]WT |
| | | CDSKRK(Pra)CCEGLRCKLW |
| | | CRKII-{Amide} |
| 402 | AllylG-[Nle6,Pra17]JzTx-V(1-29) | {H}-[AllylG]YCQKW |
| | | [Nle]WTCDSKRACC[Pra]G |
| | | LRCKLWCRKII-{Amide} |
| 403 | Nva-[Nle6,Pra17]JzTx-V(1-29) | {H}-[Nva]YCQKW[Nle]WT |
| | | CDSKRACC[Pra]GLRCKLWC |
| | | RKII-{Amide} |
| 404 | Nva-[Nle6,Lys(Pra)14]JzTx-V(1-29) | {H}-[Nva]YCQKW[Nle]WT |
| | | CDSKRK(Pra)CCEGLRCKLW |
| | | CRKII-{Amide} |
| 405 | Nva-[Nle6,Lys(Pra-NPEG3)14;JzTx-V(1-29) | {H}-[Nva]YCQKW[Nle]WT |
| | | CDSKR[KPPG3]CCEGLRCKL |
| | | WCRKII-{Amide] |
| 406 | [Nle6;Atz(NPeg 10)17;Glu28]JzTx-V(1-29) | {H}-YCQKW[Nle]WTCDSKR |
| | | ACC[Atz(PEG10)GLRCKLW |
| | | CRKEI-{Amide} |
| 407 | [Atz(NPeg10)1;Nle6;Glu20]JzTx-V(1-29) | {H}-[Atz(PEG10)CQKW |
| | | [Nle]WTCDSKRACCEGLECK |
| | | LWCRKII-{Amide} |
| 408 | [Nle6;Atz(NPeg 10)11;Glu20]JzTx-V(1-29) | {H}-YCQKW[Nle]WTCD |
| | | [Atz(PEG10)KRACCEGLEC |
| | | KLWCRKII-{Amide} |
| 409 | [Nle6;Atz(NPeg 10)17;Glu20]JzTx-V(1-29) | {H}-YCQKW[Nle]WTCDSKR |
| | | ACC[Atz(PEG10)GLECKLW |
| | | CRKII-{Amide} |
| 410 | CyA-[Nle6,Lys(Atz(NPeg10)-NPEG3)14] | {H}-[CyA]YCQKW[Nle]WT |
| | JzTx-V(1-29) | CDSKR[KAP3P10]CCEGLRC |
| | | KLWCRKII-{Amide} |
| 411 | Nva-[Nle6;Lys(Pra)14;Glu28]JzTx-V(1-29) | {H}-[Nva]YCQKW[Nle]WT |
| | | CDSKRK(Pra)CCEGLRCKLW |
| | | CRKEI-{Amide} |
| 412 | Nva-[Leu6;Lys(Pra)14;Glu28]JzTx-V(1-29) | {H}-[Nva]YCQKWLWTCDSK |
| | | RK(Pra)CCEGLRCKLWCRKE |
| | | I-{Amide} |
| 413 | Nva-[Nle6;Lys(Pra)14;Glu20;Tyr28] | {H}-[Nva]YCQKW[Nle]WT |
| | JzTx-V(1-29) | CDSKRK(Pra)CCEGLECKLW |
| | | CRKYI-{Amide} |
| 414 | Nva-[Leu6;Lys(Pra)14;Glu20;Tyr28] | {H}-[Nva]YCQKWLWTCDSK |
| | JzTx-V(1-29) | RK(Pra)CCEGLECKLWCRKY |
| | | I-{Amide} |
| 415 | Nva-[Nle6,Lys(Pra-NPEG3)14;Glu28] | {H}-[Nva]YCQKW[Nle]WT |
| | JzTx-V(1-29) | CDSKR[KPPG3]CCEGLRCKL |
| | | WCRKEI-{Amide} |
| 416 | Nva-[Leu6,Lys(Pra-NPEG3)14;Glu28] | {H}-[Nva]YCQKWLWTCDSK |
| | JzTx-V(1-29) | R[KPPG3]CCEGLRCKLWCRK |
| | | EI-{Amide} |
| 417 | Nva-[Nle6,Lys(Pra-NPEG3)14;Glu20;Tyr28] | {H}-[Nva]YCQKW[Nle]WT |
| | JzTx-V(1-29) | CDSKR[KPPG3]CCEGLECKL |
| | | WCRKYI-{Amide} |
| 418 | Nva-[Leu6,Lys(Pra-NPEG3)14;Glu20;Tyr28] | {H}-[Nva]YCQKWLWTCDSK |
| | JzTx-V(1-29) | R[KPPG3]CCEGLECKLWCRK |
| | | YI-{Amide} |
| 419 | Nva-[Nle6;Lys(Pra)14;Glu20,Trp29] | {H}-[Nva]YCQKW[Nle]WT |
| | JzTx-V(1 -29) | CDSKRK(Pra)CCEGLECKLW |
| | | CRKIW-{Amide} |
| 420 | Nva-[Leu6;Lys(Pra)14;Glu20;Trp29] | {H}-[Nva]YCQKWLWTCDSK |
| | JzTx-V(1-29) | RK(Pra)CCEGLECKLWCRKI |
| | | W-{Amide} |
| 421 | Nva-[Nle6,Lys(Pra-NPEG3)14;Glu20;Trp29] | {H}-[Nva]YCQKW[Nle]WT |
| | JzTx-V(1-29) | CDSKR[KPPG3]CCEGLECKL |
| | | WCRKIW-{Amide} |
| 422 | Nva-[Leu6,Lys(Pra-NPEG3)14;Glu20;Trp29] | {H}-[Nva]YCQKWLWTCDSK |
| | JzTx-V(1-29) | R[KPPG3]CCEGLECKLWCRK |
| | | IW-{Amide} |
| 423 | Nva-[Leu6;Lys(Pra)14]JzTx-V(1-29) | {H}-[Nva]YCQKWLWTCDSK |
| | | RK(Pra)CCEGLRCKLWCRKI |
| | | I-{Amide} |
| 424 | Nva-[Leu6,Lys(Pra-NPEG3)14]JzTx-V(1-29) | {H}-[Nva]YCQKWLWTCDSK |
| | | R[KPPG3]CCEGLRCKLWCRK |
| | | II-{Amide} |
| 425 | Pra-[Nle6]JzTx-V | {H}-[Pra]YCQKW[Nle]WT |
| | | CDSKRACCEGLRCKLWCRKI |
| | | I-{Amide} |
| 426 | Pra-[Nle6,Glu20,Trp29]JzTx-V | {H}-[Pra]YCQKW[Nle]WT |
| | | CDSKRACCEGLECKLWCRKI |
| | | W-{Amide} |
| 427 | Atz(PEG11-benzylthioacetamide)- | {H}-[Atz(PEG11- |
| | [Nle6]JzTx-V(1 -29) | benzylthioacetamide)] |
| | | YCQKW[Nle]WTCDSKRACCE |
| | | GLRCKLWCRKII-{Amide} |
| 431 | Nva-[Nle6,Lys(Pra)14]JzTx-V(1-29) | {H}-[Nva]YCQKW[Nle]WT |
| | | CDSKRK(Pra)CCEGLRCKLW |
| | | CRKII{Amide} |
| 432 | Nva-[Nle6,Lys(Pra-NPEG3)14]JzTx-V(1-29) | {H}-[Nva]YCQKW[Nle]WT |
| | | CDSKR[KPPG3]CCEGLRCKL |
| | | WCRKII{Amide} |
| 433 | Nva-[Nle6,Lys(Atz(NPEG10))14]JzTx-V(1-29) | {H}-[Nva]YCQKW[Nle]WT |
| | | CDSKR[KAtzNP10]CCEGLR |
| | | CKLWCRKII{Amide} |
| 434 | Nva-[Nle6,Lys(Atz(NPEG10)-NPEG4)14] | {H}-[Nva]YCQKW[Nle]WT |
| | JzTx-V(1-29) | CDSKR[KAP4P10]CCEGLRC |
| | | KLWCRKII{Amide} |
| 435 | Nva-[Nle6;Lys(Pra)14;Glu28]JzTx-V(1-29) | {H}-[Nva]YCQKW[Nle]WT |
| | | CDSKRK(Pra)CCEGLRCKLW |
| | | CRKEI{Amide} |
| 436 | Nva-[Nle6;Lys(Pra)14;Glu20;Tyr28] | {H}-[Nva]YCQKW[Nle]WT |
| | JzTx-V(1-29) | CDSKRK(Pra)CCEGLECKLW |
| | | CRKYI{Amide} |
| 437 | Nva-[Nle6;Lys(Pra)14;Glu20,Trp29] | {H}-[Nva]YCQKW[Nle]WT |
| | JzTx-V(1-29) | CDSKRK(Pra)CCEGLECKLW |
| | | CRKIW{Amide} |
| 438 | Nva-[Leu6,Lys(Pra)14]JzTx-V | {H}-[Nva]YCQKWLWTCDSK |
| | | RK(Pra)CCEGLRCKLWCRKI |
| | | I{Amide} |
| 439 | Nva-[Leu6;Lys(Pra)14;Glu28]JzTx-V(1-29) | {H}-[Nva]YCQKWLWTCDSK |
| | | RK(Pra)CCEGLRCKLWCRKE |
| | | I{Amide} |
| 440 | Nva-Leu6;Lys(Pra)14;Glu20;Tyr28] | {H}-[Nva]YCQKWLWTCDSK |
| | JzTx-V(1-29) | RK(Pra)CCEGLECKLWCRKY |
| | | I{Amide} |
| 441 | Nva-[Leu6;Lys(Pra)14;Glu20;Trp29] | {H}-[Nva]YCQKWLWTCDSK |
| | JzTx-V(1-29) | RK(Pra)CCEGLECKLWCRKI |
| | | W{Amide} |
| 442 | Nva-[Leu6,Lys(Pra-NPEG4)14;Glu28] | {H}-[Nva]YCQKWLWTCDSK |
| | JzTx-V(1-29) | RK(Pra-NPEG4)CCEGLRCK |
| | | LWCRKEI{Amide} |
| 443 | CyA-[Nle6,Atz(NPEG10)17,Glu28] | {H}-[CyA]YCQKW[Nle]WT |
| | JzTx-V(1-29) | CDSKRACC[Atz(NPEG10)] |
| | | GLRCKLWCRKEI{Amide} |
| 444 | CyA-[Nle6,Lys(Atz(NPEG10))14,Glu28] | {H}-[CyA]YCQKW[Nle]WT |
| | JzTx-V(1-29) | CDSKRK(Atz(NPEG10))CC |
| | | EGLRCKLWCRKEI{Amide} |
| 445 | CyA-[Nle6,Lys(Atz(NPEG10))14,Glu20,Tyr28] | {H}-[CyA]YCQKW[Nle]WT |
| | JzTx-V(1-29) | CDSKRK(Atz(NPEG10))CC |
| | | EGLECKLWCRKYI{Amide} |
| 446 | Nva-[Leu6;Lys(Atz(NPEG10))14PzTx-V(1-29) | {H}-[Nva]YCQKWLWTCDSK |
| | | RK(Atz(NPEG10))CCEGLR |
| | | CKLWCRKII{Amide} |
| 447 | Nva-[Leu6,Lys(Atz(NPEG10))14;Glu28]JzTx-V | {H}-[Nva]YCQKWLWTCDSK |
| | | RK(Atz(NPEG10))CCEGLR |
| | | CKLWCRKEI{Amide} |
| 448 | Nva-[Nle6;Lys(Atz(NPEG10))14;Glu28] | {H}-[Nva]YCQKW[Nle]WT |
| | JzTx-V(1-29) | CDSKRK(Atz(NPEG10))CC |
| | | EGLRCKLWCRKEI{Amide} |
| 449 | CyA-[Leu6,Lys(Pra)14,Glu28]JzTx-V(1-29) | {H}-[CyA]YCQKWLWTCDSK |
| | | RK(Pra)CCEGLRCKLWCRKE |
| | | I{Amide} |
| 450 | Pra-[Nle6;Glu28;Trp29]JzTx-V(1-29) | {H}-[Pra]YCQKW[Nle]WT |
| | | CDSKRACCEGLRCKLWCRKEW |
| | | {Amide} |
| 451 | CyA-[Nle6;Lys(Pra)14;Glu28;Trp29] | {H}-[CyA]YCQKW[Nle]WT |
| | JzTx-V(1-29) | CDSKRK(Pra)CCEGLRCKLW |
| | | CRKEW{Amide} |
| 452 | CyA-[Nle6;Pra17;Glu28;Trp29]JzTx-V(1-29) | {H}-[CyA]YCQKW[Nle]WT |
| | | CDSKRACC[Pra]GLRCKLWC |
| | | RKEW{Amide} |
| 453 | CyA-[Nle6;Lys(Pra)14;Trp29]JzTx-V(1-29) | {H}-[CyA]YCQKW[Nle]WT |
| | | CDSKRK(Pra)CCEGLRCKLW |
| | | CRKIW{Amide} |
| 454 | CyA-[Nle6;Pra17;Trp29]JzTx-V(1-29) | {H}-[CyA]YCQKW[Nle]WT |
| | | CDSKRACC[Pra]GLRCKLWC |
| | | RKIW{Amide} |
| 455 | CyA-[Nle6;Lys(NPEG11)14;Glu28] | {H}-{CyA}YCQKW{Nle}WT |
| | JzTx-V(1-29) | CDSKRK(NPeg11)CCEGLRC |
| | | KLWCRKEI{Amide} |
| 456 | CyA-[Nle6;Lys(NPEG11)17;Glu28] | {H}-[CyA]YCQKW[Nle]WT |
| | JzTx-V(1-29) | CDSKRACCK(NPeg11)GLRC |
| | | KLWCRKEI{Amide} |
| 457 | Lys(NPEG11)-[Nle6;Glu28]JzTx-V(1-29) | {H}-K(NPeg11)YCQKW |
| | | [Nle]WTCDSKRACCEGLRCK |
| | | LWCRKEI{Amide} |
| 458 | CyA-[Nle6;Lys(NPEG11)14;Glu28;Trp29] | {H}-[CyA]YCQKW[Nle]WT |
| | JzTx-V(1-29) | CDSKRK(NPeg11)CCEGLRC |
| | | KLWCRKEW{Amide} |
| 459 | CyA-[Nle6;Lys(NPEG11)17;Glu28;Trp29] | {H}-[CyA]YCQKW[Nle]WT |
| | JzTx-V(1-29) | CDSKRACCK(NPeg11)GLRC |
| | | KLWCRKEW{Amide} |
| 460 | Lys(NPEG11)-[Nle6;Glu28;Trp29] | {H}-K(NPeg11)YCQKW |
| | JzTx-V(1-29) | [Nle]WTCDSKRACCEGLRCK |
| | | LWCRKEW{Amide} |
| 461 | Leu-[Nle6;Lys(NPEG11)14;Glu28] | {H}-LYCQKW[Nle]WTCDSK |
| | JzTx-V(1-29) | RK(NPeg11)CCEGLRCKLWC |
| | | RKEI{Amide} |
| 462 | Leu-[Nle6;Lys(NPEG11)17;Glu28] | {H}-LYCQKW[Nle]WTCDSK |
| | JzTx-V(1-29) | RACCK(NPeg11)GLRCKLWC |
| | | RKEI{Amide} |
| 463 | D-Leu-[Nle6;Lys(NPEG11)14;Glu28] | {H}-lYCQKW[Nle]WTCDSK |
| | JzTx-V(1-29) | RK(NPeg11)CCEGLRCKLWC |
| | | RKEI{Amide} |
| 464 | D-Leu-[Nle6;Lys(NPEG11)17;Glu28] | {H}-lYCQKW[Nle]WTCDSK |
| | JzTx-V(1-29) | RACCK(NPeg11)GLRCKLWC |
| | | RKEI{Amide} |
| 465 | NMeLeu-[Nle6;Lys(NPEG11)14;Glu28] | {H}-[NMeLeu]YCQKW |
| | JzTx-V(1-29) | [Nle]WTCDSKRK(NPeg11) |
| | | CCEGLRCKLWCRKEI |
| | | {Amide} |
| 466 | NMeLeu-[Nle6;Lys(NPEG11)17;Glu28] | {H}-[NMeLeu]YCQKW |
| | JzTx-V(1-29) | [Nle]WTCDSKRACCK |
| | | (NPeg11)GLRCKLWCRKEI |
| | | {Amide} |
| 467 | 1-Ach-[Nle6;Lys(NPEG11)14;Glu28] | {H}-[1-Ach]YCQKW |
| | JzTx-V(1-29) | [Nle]WTCDSKRK |
| | | (NPeg11)CCEGLRCKLWCR |
| | | KEI{Amide} |
| 468 | 1-Ach-[Nle6;Lys(NPEG11)17;Glu28] | {H}-[1-Ach]YCQKW |
| | JzTx-V(1-29) | [Nle]WTCDSKRACCK |
| | | (NPeg11)GLRCKLWCRKEI |
| | | {Amide} |
| 469 | Leu-Lys(NPEG11)-[Nle6;Glu28]JzTx-V(1-29) | {H}-LK(NPeg11)YCQKW |
| | | [Nle]WTCDSKRACCEGLRC |
| | | KLWCRKEI{Amide} |
| 470 | Leu-Nva-[Nle6;Lys(NPEG11)14;Glu28] | {H}-L[Nva]YCQKW[Nle] |
| | JzTx-V(1-29) | WTCDSKRK(NPeg11)CCEG |
| | | LRCKLWCRKEI{Amide} |
| 471 | Leu-Nva-[Nle6;Lys(NPEG11)17;Glu28] | {H}-L[Nva]YCQKW[Nle] |
| | JzTx-V(1-29) | WTCDSKRACCK(NPeg11)G |
| | | LRCKLWCRKEI{Amide} |
| 472 | D-Leu-Nva-[Nle6;Lys(NPEG11)14;Glu28] | {H}-l[Nva]YCQKW[Nle] |
| | JzTx-V(1-29) | WTCDSKRK(NPeg11)CCEG |
| | | LRCKLWCRKEI{Amide} |
| 473 | D-Leu-Nva-[Nle6;Lys(NPEG11)17;Glu28] | {H}-l[Nva]YCQKW[Nle] |
| | JzTx-V(1-29) | WTCDSKRACCK(NPeg11)G |
| | | LRCKLWCRKEI{Amide} |
| 474 | Phe-Nva-[Nle6;Lys(NPEG11)14;Glu28] | {H}-F[Nva]YCQKW[Nle] |
| | JzTx-V(1-29) | WTCDSKRK(NPeg11)CCEG |
| | | LRCKLWCRKEI{Amide} |
| 475 | Phe-Nva-[Nle6;Lys(NPEG11)17;Glu28] | {H}-F[Nva]YCQKW[Nle] |
| | JzTx-V(1-29) | WTCDSKRACCK(NPeg11)G |
| | | LRCKLWCRKEI{Amide} |
| 476 | CyA-[Nle6;Lys(NPEG11)20;Trp29] | {H}-[CyA]YCQKW[Nle]W |
| | JzTx-V(1-29) | TCDSKRACCEGLK |
| | | (NPeg11)CKLWCRKIW |
| | | {Amide} |
| 518 | CyA-[Pra1;Nle6;Glu28]JzTx-V(1-29) | {H}-[CyA][Pra]CQKW |
| | | [Nle]WTCDSKRACCEGLRC |
| | | KLWCRKEI{Amide} |
| 519 | CyA-[Nle6;Pra10;Glu28]JzTx-V(1-29) | {H}-[CyA]YCQKW[Nle]W |
| | | TC[Pra]SKRACCEGLRCKL |
| | | WCRKEI{Amide} |
| 520 | CyA-[Nle6;Pra11;Glu28]JzTx-V(1-29) | {H}-[CyA]YCQKW[Nle]W |
| | | TCD[Pra]KRACCEGLRCKL |
| | | WCRKEI{Amide} |
| 521 | CyA-[Nle6;Pra12;Glu28]JzTx-V(1-29) | {H}-[CyA]YCQKW[Nle]W |
| | | TCDS[Pra]RACCEGLRCKL |
| | | WCRKEI{Amide} |
| 522 | CyA-[Nle6;Pra13;Glu28]JzTx-V(1-29) | {H}-[CyA]YCQKW[Nle]W |
| | | TCDSK[Pra]ACCEGLRCKL |
| | | WCRKEI{Amide} |
| 523 | CyA-[Nle6;Pra18;Glu28]JzTx-V(1-29) | {H}-[CyA]YCQKW[Nle]W |
| | | TCDSKRACCE[Pra]LRCKL |
| | | WCRKEI{Amide} |
| 524 | CyA-[Nle6;Pra19;Glu28]JzTx-V(1-29) | {H}-[CyA]YCQKW[Nle]W |
| | | TCDSKRACCEG[Pra]RCKL |
| | | WCRKEI{Amide} |
| 525 | CyA-[Nle6;Pra20;Glu28]JzTx-V(1-29) | {H}-[CyA]YCQKW[Nle]W |
| | | TCDSKRACCEGL[Pra]CKL |
| | | WCRKEI{Amide} |
| 526 | CyA-[Pra1;Nle6;Glu28;Trp29]JzTx-V(1-29) | {H}-[CyA][Pra]CQKW |
| | | [Nle]WTCDSKRACCEGLRC |
| | | KLWCRKEW{Amide} |
| 527 | CyA-[Nle6;Pra10;Glu28;Trp29]JzTx-V(1-29) | {H}-[CyA]YCQKW[Nle]W |
| | | TC[Pra]SKRACCEGLRCKL |
| | | WCRKEW{Amide} |
| 545 | CyA-[Nle6;Lys(NPEG11)20]JzTx-V(1-29) | {H}-[CyA]YCQKW[Nle]W |
| | | TCDSKRACCEGLK |
| | | (NPeg11)CKLWCRKII |
| | | {Amide} |
| 546 | CyA-[Nle6;Val8;Lys(NPEG11)14;Glu28] | {H}-[CyA]YCQKW[Nle]W |
| | JzTx-V(1-29) | VCDSKRK(NPeg11)CCEGL |
| | | RCKLWCRKEI{Amide} |
| 547 | CyA-[Nle6;Val8;Lys(NPEG11)17;Glu28] | {H}-[CyA]YCQKW[Nle]W |
| | JzTx-V(1-29) | VCDSKRACCK(NPeg11)GL |
| | | RCKLWCRKEI{Amide} |
| 548 | CyA-[Leu3;Nle6;Lys(NPEG11)14;Glu28] | {H}-[CyA]YCLKW[Nle]W |
| | JzTx-V(1-29) | TCDSKRK(NPeg11)CCEGL |
| | | RCKLWCRKEI{Amide} |
| 549 | CyA-[Leu3;Nle6;Lys(NPEG11)17;Glu28] | {H}-[CyA]YCLKW[Nle]W |
| | JzTx-V(1-29) | TCDSKRACCK(NPeg11)GL |
| | | RCKLWCRKEI{Amide} |
| 550 | CyA-[Phe1;Nle6;Lys(NPEG11)14;Glu28] | {H}-[CyA]FCQKW[Nle]W |
| | JzTx-V(1-29) | TCDSKRK(NPeg11)CCEGL |
| | | RCKLWCRKEI{Amide} |
| 551 | CyA-[Phe1;Nle6;Lys(NPEG11)17;Glu28] | {H}-[CyA]FCQKW[Nle]W |
| | JzTx-V(1-29) | TCDSKRACCK(NPeg11)GL |
| | | RCKLWCRKEI{Amide} |
| 552 | CyA-[Nle4,6;Lys(NPEG11)14;Glu28] | {H}-[CyA]YCQ[Nle]W |
| | JzTx-V(1-29) | [Nle]WTCDSKRK |
| | | (NPeg11)CCEGLRCKLWCR |
| | | KEI{Amide} |
| 553 | CyA-[Nle4,6;Lys(NPEG11)17;Glu28] | {H}-[CyA]YCQ[Nle]W |
| | JzTx-V(1-29) | [Nle]WTCDSKRACCK |
| | | (NPeg11)GLRCKLWCRKEI |
| | | {Amide} |
| 554 | CyA-[Nle6,22;Lys(NPEG11)14;Glu28] | {H}-[CyA]YCQKW[Nle]W |
| | JzTx-V(1-29) | TCDSKRK(NPeg11)CCEGL |
| | | RC[Nle]LWCRKEI |
| | | {Amide} |
| 555 | CyA-[Nle6,22;Lys(NPEG11)17;Glu28] | {H}-[CyA]YCQKW[Nle]W |
| | JzTx-V(1-29) | TCDSKRACCK(NPeg11)GL |
| | | RC[Nle]LWCRKEI |
| | | {Amide} |
| 556 | CyA-[Nle6,27;Lys(NPEG11)14;Glu28] | {H}-[CyA]YCQKW[Nle]W |
| | JzTx-V(1-29) | TCDSKRK(NPeg11)CCEGL |
| | | RCKLWCR[Nle]EI |
| | | {Amide} |
| 557 | CyA-[Nle6,27;Lys(NPEG11)17;Glu28] | {H}-[CyA]YCQKW[Nle]W |
| | JzTx-V(1-29) | TCDSKRACCK(NPeg11)GL |
| | | RCKLWCR[Nle]EI |
| | | {Amide} |
| 558 | CyA-[Nle6;Lys(NPEG11)14,26;Glu28] | {H}-[CyA]YCQKW[Nle]W |
| | JzTx-V(1-29) | TCDSKRK(NPeg11)CCEGL |
| | | RCKLWCKKEI{Amide} |
| 559 | CyA-[Nle6;Lys(NPEG11)17,26;Glu28] | {H}-[CyA]YCQKW[Nle]W |
| | JzTx-V(1-29) | TCDSKRACCK(NPeg11)GL |
| | | RCKLWCKKEI{Amide} |
| 560 | CyA-[Nle6,12;Lys(NPEG11)14;Glu28] | {H}-[CyA]YCQKW[Nle]W |
| | JzTx-V(1-29) | TCDS[Nle]RK(NPeg11)C |
| | | CEGLRCKLWCRKEI |
| | | {Amide} |
| 561 | CyA-[Nle6,12;Lys(NPEG11)17;Glu28] | {H}-[CyA]YCQKW[Nle]W |
| | JzTx-V(1-29) | TCDS[Nle]RACCK |
| | | (NPeg11)GLRCKLWCRKEI |
| | | {Amide} |
| 562 | CyA-[Nle6;Phe14;Lys(NPEG11)17;Glu28] | {H}-[CyA]YCQKW[Nle]W |
| | JzTx-V(1-29) | TCDSKRFCCK(NPeg11)GL |
| | | RCKLWCRKEI{Amide} |
| 563 | CyA-[Lys(NPEG11);Nle6;Glu28]JzTx-V(1-29) | {H}-[CyA]K(NPeg11)CQ |
| | | KW[Nle]WTCDSKRACCEGL |
| | | RCKLWCRKEI{Amide} |
| 564 | CyA-[Nle6;Lys(NPEG11)10;Glu28] | {H}-[CyA]YCQKW[Nle]W |
| | JzTx-V(1-29) | TCK(NPeg11)SKRACCEGL |
| | | RCKLWCRKEI{Amide} |
| 565 | CyA-[Nle6;Lys(NPEG11)11;Glu28] | {H}-[CyA]YCQKW[Nle]W |
| | JzTx-V(1-29) | TCDK(NPeg11)KRACCEGL |
| | | RCKLWCRKEI{Amide} |
| 566 | CyA-[Nle6;Lys(NPEG11)12;Glu28] | {H}-[CyA]YCQKW[Nle]W |
| | JzTx-V(1-29) | TCDSK(NPeg11)RACCEGL |
| | | RCKLWCRKEI{Amide} |
| 567 | CyA-[Nle6;Lys(NPEG11)13;Glu28] | {H}-[CyA]YCQKW[Nle]W |
| | JzTx-V(1-29) | TCDSKK(NPeg11)ACCEGL |
| | | RCKLWCRKEI{Amide} |
| 568 | CyA-[Nle6;Lys(NPEG11)18;Glu28] | {H}-[CyA]YCQKW[Nle]W |
| | JzTx-V(1-29) | TCDSKRACCEK(NPeg11)L |
| | | RCKLWCRKEI{Amide} |
| 569 | CyA-[Nle6;Lys(NPEG11)19;Glu28] | {H}-[CyA]YCQKW[Nle]W |
| | JzTx-V(1-29) | TCDSKRACCEGK(NPeg11) |
| | | RCKLWCRKEI{Amide} |
| 570 | CyA-[Nle6;Lys(NPEG11)20;Glu28] | {H}-[CyA]YCQKW[Nle]W |
| | JzTx-V(1-29) | TCDSKRACCEGLK |
| | | (NPeg11)CKLWCRKEI |
| | | {Amide} |
| 571 | Atz-[Nle6]JzTx-V | {H}-[Atz]YCQKW[Nle]W |
| | | TCDSKRACCEGLRCKLWCRK |
| | | II-{Amide} |
| 572 | Atz-[Nle6]JzTx-V | {H}-[Atz]YCQKW[Nle]W |
| | | TCDSKRACCEGLRCKLWCRK |
| | | II-{Amide} |
| 573 | CyA-[Nle6;Pra11;Glu28;Trp29]JzTx-V(1-29) | {H}-[CyA]YCQKW[Nle]W |
| | | TCD[Pra]KRACCEGLRCKL |
| | | WCRKEW{Amide} |
| 574 | CyA-[Nle6;Pra12;Glu28;Trp29]JzTx-V(1-29) | {H}-[CyA]YCQKW[Nle]W |
| | | TCDS[Pra]RACCEGLRCKL |
| | | WCRKEW{Amide} |
| 575 | CyA-[Nle6;Pra13;Glu28;Trp29]JzTx-V(1-29) | {H}-[CyA]YCQKW[Nle]W |
| | | TCDSK[Pra]ACCEGLRCKL |
| | | WCRKEW{Amide} |
| 576 | CyA-[Nle6;Pra18;Glu28;Trp29]JzTx-V(1-29) | {H}-[CyA]YCQKW[Nle]W |
| | | TCDSKRACCE[Pra]LRCKL |
| | | WCRKEW{Amide} |
| 577 | CyA-[Nle6;Pra19;Glu28;Trp29]JzTx-V(1-29) | {H}-[CyA]YCQKW[Nle]W |
| | | TCDSKRACCEG[Pra]RCKL |
| | | WCRKEW{Amide} |
| 578 | CyA-[Nle6;Pra20;Glu28;Trp29]JzTx-V(1-29) | {H}-[CyA]YCQKW[Nle]W |
| | | TCDSKRACCEGL[Pra]CKL |
| | | WCRKEW{Amide} |
| 579 | CyA-[Pra1;Nle6]JzTx-V(1-29) | {H}-[CyA][Pra]CQKW |
| | | [Nle]WTCDSKRACCEGLRC |
| | | KLWCRKII{Amide} |
| 580 | Nva-[Pra1;Nle6]JzTx-V(1-29) | {H}-[Nva][Pra]CQKW |
| | | [Nle]WTCDSKRACCEGLRC |
| | | KLWCRKII{Amide} |
| 581 | Leu-[Pra1;Nle6]JzTx-V(1-29) | {H}-L[Pra]CQKW[Nle]W |
| | | TCDSKRACCEGLRCKLWCRK |
| | | II{Amide} |
| 582 | D-Leu-[Pra1;Nle6]JzTx-V(1-29) | {H}-l[Pra]CQKW[Nle]W |
| | | TCDSKRACCEGLRCKLWCRK |
| | | II{Amide} |
| 583 | Leu-Leu-[Pra1;Nle6]JzTx-V(1-29) | {H}-LL[Pra]CQKW[Nle] |
| | | WTCDSKRACCEGLRCKLWCR |
| | | KII{Amide} |
| 584 | CyA-[Pra1;Leu6]JzTx-V(1-29) | {H}-[CyA][Pra]CQKWLW |
| | | TCDSKRACCEGLRCKLWCRK |
| | | II{Amide} |
| 585 | Nva-[Pra1;Leu6]JzTx-V(1-29) | {H}-[Nva][Pra]CQKWLW |
| | | TCDSKRACCEGLRCKLWCRK |
| | | II{Amide} |
| 586 | Leu-[Pra1;Leu6]JzTx-V(1-29) | {H}-L[Pra]CQKWLWTCDS |
| | | KRACCEGLRCKLWCRKII |
| | | {Amide} |
| 587 | D-Leu-[Pra1;Leu6]JzTx-V(1-29) | {H}-l[Pra]CQKWLWTCDS |
| | | KRACCEGLRCKLWCRKII |
| | | {Amide} |
| 588 | Leu-Leu-[Pra1;Leu6]JzTx-V(1-29) | {H}-LL[Pra]CQKWLWTCD |
| | | SKRACCEGLRCKLWCRKII |
| | | {Amide} |
| 595 | Pra-[Nle6,Trp29]JzTx-V(1-29) | {H}-[Pra]YCQKW[Nle]W |
| | | TCDSKRACCEGLRCKLWCRK |
| | | IW{Amide} |
| 596 | Pra-[Nle6;Ala28]JzTx-V(1-29)-FreeAcid | {H}-[Pra]YCQKW[Nle]W |
| | | TCDSKRACCEGLRCKLWCRK |
| | | AI{FreeAcid} |
| 597 | Pra-[Nle6;Asp28]JzTx-V(1-29)-FreeAcid | {H}-[Pra]YCQKW[Nle]W |
| | | TCDSKRACCEGLRCKLWCRK |
| | | DI{FreeAcid} |
| 598 | Pra-[Nle6;Phe28]JzTx-V(1-29)-FreeAcid | {H}-[Pra]YCQKW[Nle]W |
| | | TCDSKRACCEGLRCKLWCRK |
| | | FI{FreeAcid} |
| 599 | Pra-[Nle6;Gly28]JzTx-V(1-29)-FreeAcid | {H}-[Pra]YCQKW[Nle]W |
| | | TCDSKRACCEGLRCKLWCRK |
| | | GI{FreeAcid} |
| 600 | Pra-[Nle6;His28]JzTx-V(1-29)-FreeAcid | {H}-[Pra]YCQKW[Nle]W |
| | | TCDSKRACCEGLRCKLWCRK |
| | | HI{FreeAcid} |
| 601 | Pra-[Nle6;Lys28]JzTx-V(1-29)-FreeAcid | {H}-[Pra]YCQKW[Nle]W |
| | | TCDSKRACCEGLRCKLWCRK |
| | | KI{FreeAcid} |
| 602 | Pra-[Nle6;Leu28]JzTx-V(1-29)-FreeAcid | {H}-[Pra]YCQKW[Nle]W |
| | | TCDSKRACCEGLRCKLWCRK |
| | | LI{FreeAcid} |
| 603 | Pra-[Nle6,28]JzTx-V(1-29)-FreeAcid | {H}-[Pra]YCQKW[Nle]W |
| | | TCDSKRACCEGLRCKLWCRK |
| | | [Nle]I{FreeAcid} |
| 604 | Pra-[Nle6;Asn28]JzTx-V(1-29)-FreeAcid | {H}-[Pra]YCQKW[Nle]W |
| | | TCDSKRACCEGLRCKLWCRK |
| | | NI{FreeAcid} |
| 605 | Pra-[Nle6;Pro28]JzTx-V(1-29)-FreeAcid | {H}-[Pra]YCQKW[Nle]W |
| | | TCDSKRACCEGLRCKLWCRK |
| | | PI{FreeAcid} |
| 606 | Pra-[Nle6;Gln28]JzTx-V(1-29)-FreeAcid | {H}-[Pra]YCQKW[Nle]W |
| | | TCDSKRACCEGLRCKLWCRK |
| | | QI{FreeAcid} |
| 607 | Pra-[Nle6;Arg28]JzTx-V(1-29)-FreeAcid | {H}-[Pra]YCQKW[Nle]W |
| | | TCDSKRACCEGLRCKLWCRK |
| | | RI{FreeAcid} |
| 608 | Pra-[Nle6;Ser28]JzTx-V(1-29)-FreeAcid | {H}-[Pra]YCQKW[Nle]W |
| | | TCDSKRACCEGLRCKLWCRK |
| | | SI{FreeAcid} |
| 609 | Pra-[Nle6;Thr28]JzTx-V(1-29)-FreeAcid | {H}-[Pra]YCQKW[Nle]W |
| | | TCDSKRACCEGLRCKLWCRK |
| | | TI{FreeAcid} |
| 610 | Pra-[Nle6;Val28]JzTx-V(1-29)-FreeAcid | {H}-[Pra]YCQKW[Nle]W |
| | | TCDSKRACCEGLRCKLWCRK |
| | | VI{FreeAcid} |
| 611 | Pra-[Nle6;Trp28]JzTx-V(1-29)-FreeAcid | {H}-[Pra]YCQKW[Nle]W |
| | | TCDSKRACCEGLRCKLWCRK |
| | | WI{FreeAcid} |
| 612 | Pra-[Nle6;1-Nal28]JzTx-V(1-29)-FreeAcid | {H}-[Pra]YCQKW[Nle]W |
| | | TCDSKRACCEGLRCKLWCRK |
| | | {1-Nal]I{FreeAcid} |
| 613 | Pra-[Nle6;Ala20]JzTx-V(1-29)-FreeAcid | {H}-[Pra]YCQKW[Nle]W |
| | | TCDSKRACCEGLACKLWCRK |
| | | II{FreeAcid} |
| 614 | Pra-[Nle6;Asp20]JzTx-V(1-29)-FreeAcid | {H}-[Pra]YCQKW[Nle]W |
| | | TCDSKRACCEGLDCKLWCRK |
| | | II{FreeAcid} |
| 615 | Pra-[Nle6;Glu20]JzTx-V(1-29)-FreeAcid | {H}-W[Pra]YCQKW[Nle] |
| | | WTCDSKRACCEGLECKLWCR |
| | | KII{FreeAcid} |
| 616 | Pra-[Nle6;Phe20]JzTx-V(1-29)-FreeAcid | {H}-W[Pra]YCQKW[Nle] |
| | | WTCDSKRACCEGLFCKLWCR |
| | | KII{FreeAcid} |
| 617 | Pra-[Nle6;Gly20]JzTx-V(1-29)-FreeAcid | {H}-[Pra]YCQKW[Nle]W |
| | | TCDSKRACCEGLGCKLWCRK |
| | | II{FreeAcid} |
| 618 | Pra-[Nle6;His20]JzTx-V(1-29)-FreeAcid | {H}-[Pra]YCQKW[Nle]W |
| | | TCDSKRACCEGLHCKLWCRK |
| | | II{FreeAcid} |
| 619 | Pra-[Nle6;Ile20]JzTx-V(1-29)-FreeAcid | {H}-W[Pra]YCQKW[Nle] |
| | | WTCDSKRACCEGLICKLWCR |
| | | KII{FreeAcid} |
| 620 | Pra-[Nle6;Lys20]JzTx-V(1-29)-FreeAcid | {H}-[Pra]YCQKW[Nle]W |
| | | TCDSKRACCEGLKCKLWCRK |
| | | II{FreeAcid} |
| 621 | Pra-[Nle6;Leu20]JzTx-V(1-29)-FreeAcid | {H}-W[Pra]YCQKW[Nle] |
| | | WTCDSKRACCEGLLCKLWCR |
| | | KII{FreeAcid} |
| 622 | Pra-[Nle6,20]JzTx-V(1-29)-FreeAcid | {H}-[Pra]YCQKW[Nle]W |
| | | TCDSKRACCEGL[Nle]CKL |
| | | WCRKII{FreeAcid} |
| 623 | Pra-[Nle6;Asn20]JzTx-V(1-29)-FreeAcid | {H}-[Pra]YCQKW[Nle]W |
| | | TCDSKRACCEGLNCKLWCRK |
| | | II{FreeAcid} |
| 624 | Pra-[Nle6;Pro20]JzTx-V(1-29)-FreeAcid | {H}-[Pra]YCQKW[Nle]W |
| | | TCDSKRACCEGLPCKLWCRK |
| | | II{FreeAcid} |
| 625 | Pra-[Nle6;Gln20]JzTx-V(1-29)-FreeAcid | {H}-[Pra]YCQKW[Nle]W |
| | | TCDSKRACCEGLQCKLWCRK |
| | | II{FreeAcid} |
| 626 | Pra-[Nle6;Ser20]JzTx-V(1-29)-FreeAcid | {H}-[Pra]YCQKW[Nle]W |
| | | TCDSKRACCEGLSCKLWCRK |
| | | II{FreeAcid} |
| 627 | Pra-[Nle6;Thr20]JzTx-V(1-29)-FreeAcid | {H}-[Pra]YCQKW[Nle]W |
| | | TCDSKRACCEGLTCKLWCRK |
| | | II{FreeAcid} |
| 628 | Pra-[Nle6;Val20]JzTx-V(1-29)-FreeAcid | {H}-[Pra]YCQKW[Nle]W |
| | | TCDSKRACCEGLVCKLWCRK |
| | | II{FreeAcid} |
| 629 | Pra-[Nle6;Trp20]JzTx-V(1-29)-FreeAcid | {H}-[Pra]YCQKW[Nle]W |
| | | TCDSKRACCEGLWCKLWCRK |
| | | II{FreeAcid} |
| 630 | Pra-[Nle6;Tyr20]JzTx-V(1-29)-FreeAcid | {H}-[Pra]YCQKW[Nle]W |
| | | TCDSKRACCEGLYCKLWCRK |
| | | II{FreeAcid} |
| 631 | Pra-[Nle6;1-Nal20]JzTx-V(1-29)-FreeAcid | {H}-[Pra]YCQKW[Nle]W |
| | | TCDSKRACCEGL[1-Nal]C |
| | | KLWCRKII{FreeAcid} |
| 632 | Pra-[Nle6;Asp20;Glu28]JzTx-V(1-29)- | {H}-[Pra]YCQKW[Nle]W |
| | FreeAcid | TCDSKRACCEGLDCKLWCRK |
| | | EI{FreeAcid} |
| 633 | Pra-[Nle6;Glu20,28]JzTx-V(1-29)-FreeAcid | {H}-W[Pra]YCQKW[Nle] |
| | | WTCDSKRACCEGLECKLWCR |
| | | KEI{FreeAcid} |
| 634 | Pra-[Nle6;Phe20;Glu28]JzTx-V(1-29)- | {H}-[Pra]YCQKW[Nle]W |
| | FreeAcid | TCDSKRACCEGLFCKLWCRK |
| | | EI{FreeAcid} |
| 635 | Pra-[Nle6;Gly20;Glu28]JzTx-V(1-29)- | {H}-[Pra]YCQKW[Nle]W |
| | FreeAcid | TCDSKRACCEGLGCKLWCRK |
| | | EI{FreeAcid} |
| 636 | Pra-[Nle6;His20;Glu28]JzTx-V(1-29)- | {H}-[Pra]YCQKW[Nle]W |
| | FreeAcid | TCDSKRACCEGLHCKLWCRK |
| | | EI{FreeAcid} |
| 637 | Pra-[Nle6;Ile20;Glu28]JzTx-V(1-29)- | {H}-W[Pra]YCQKW[Nle] |
| | FreeAcid | WTCDSKRACCEGLICKLWCR |
| | | KEI{FreeAcid} |
| 638 | Pra-[Nle6;Leu20;Glu28]JzTx-V(1-29)- | {H}-[Pra]YCQKW[Nle]W |
| | FreeAcid | TCDSKRACCEGLLCKLWCRK |
| | | EI{FreeAcid} |
| 639 | Pra-[Nle6,20;Glu28]JzTx-V(1-29)- | {H}-W[Pra]YCQKW[Nle] |
| | FreeAcid | WTCDSKRACCEGL[Nle]CK |
| | | LWCRKEI{FreeAcid} |
| 640 | Pra-[Nle6;Asn20;Glu28]JzTx-V(1-29)- | {H}-[Pra]YCQKW[Nle]W |
| | FreeAcid | TCDSKRACCEGLNCKLWCRK |
| | | EI{FreeAcid} |
| 641 | Pra-[Nle6;Pro20;Glu28]JzTx-V(1-29)- | {H}-[Pra]YCQKW[Nle]W |
| | FreeAcid | TCDSKRACCEGLPCKLWCRK |
| | | EI{FreeAcid} |
| 642 | Pra-[Nle6;Gln20;Glu28]JzTx-V(1-29)- | {H}-[Pra]YCQKW[Nle]W |
| | FreeAcid | TCDSKRACCEGLQCKLWCRK |
| | | EI{FreeAcid} |
| 643 | Pra-[Nle6;Ser20;Glu28]JzTx-V(1-29)- | {H}-[Pra]YCQKW[Nle]W |
| | FreeAcid | TCDSKRACCEGLSCKLWCRK |
| | | EI{FreeAcid} |
| 644 | Pra-[Nle6;Thr20;Glu28]JzTx-V(1-29)- | {H}-[Pra]YCQKW[Nle]W |
| | FreeAcid | TCDSKRACCEGLTCKLWCRK |
| | | EI{FreeAcid} |
| 645 | Pra-[Nle6;Val20;Glu28]JzTx-V(1-29)- | {H}-[Pra]YCQKW[Nle]W |
| | FreeAcid | TCDSKRACCEGLVCKLWCRK |
| | | EI{FreeAcid} |
| 646 | Pra-[Nle6;Trp20;Glu28]JzTx-V(1-29)- | {H}-[Pra]YCQKW[Nle]W |
| | FreeAcid | TCDSKRACCEGLWCKLWCRK |
| | | EI{FreeAcid} |
| 647 | Pra-[Nle6;Tyr20;Glu28]JzTx-V(1-29)- | {H}-[Pra]YCQKW[Nle]W |
| | FreeAcid | TCDSKRACCEGLYCKLWCRK |
| | | EI{FreeAcid} |
| 648 | Pra-[Nle6;1-Nal20;Glu28]JzTx-V(1-29)- | {H}-[Pra]YCQKW[Nle]W |
| | FreeAcid | TCDSKRACCEGL[1-Nal]C |
| | | KLWCRKEI{FreeAcid} |
| 649 | Pra-[Nle6;Ala28]JzTx-V(1-29) | {H}-[Pra]YCQKW[Nle]W |
| | | TCDSKRACCEGLRCKLWCRK |
| | | AI{Amide} |
| 650 | Pra-[Nle6;Phe28]JzTx-V(1-29) | {H}-[Pra]YCQKW[Nle]W |
| | | TCDSKRACCEGLRCKLWCRK |
| | | FI{Amide} |
| 651 | Pra-[Nle6;Gly28]JzTx-V(1-29) | {H}-[Pra]YCQKW[Nle]W |
| | | TCDSKRACCEGLRCKLWCRK |
| | | GI{Amide} |
| 652 | Pra-[Nle6;His28]JzTx-V(1-29) | {H}-[Pra]YCQKW[Nle]W |
| | | TCDSKRACCEGLRCKLWCRK |
| | | HI{Amide} |
| 653 | Pra-[Nle6;Tyr28]JzTx-V(1-29) | {H}-[Pra]YCQKW[Nle]W |
| | | TCDSKRACCEGLRCKLWCRK |
| | | YI{Amide} |
| 654 | Pra-[Nle6;Lys28]JzTx-V(1-29) | {H}-[Pra]YCQKW[Nle]W |
| | | TCDSKRACCEGLRCKLWCRK |
| | | KI{Amide} |
| 655 | Pra-[Nle6;Leu28]JzTx-V(1-29) | {H}-[Pra]YCQKW[Nle]W |
| | | TCDSKRACCEGLRCKLWCRK |
| | | LI{Amide} |
| 656 | Pra-[Nle6;Asn28]JzTx-V(1-29) | {H}-[Pra]YCQKW[Nle]W |
| | | TCDSKRACCEGLRCKLWCRK |
| | | NI{Amide} |
| 657 | Pra-[Nle6;Pro28]JzTx-V(1-29) | {H}-[Pra]YCQKW[Nle]W |
| | | TCDSKRACCEGLRCKLWCRK |
| | | PI{Amide} |
| 658 | Pra-[Nle6;Arg28]JzTx-V(1-29) | {H}-[Pra]YCQKW[Nle]W |
| | | TCDSKRACCEGLRCKLWCRK |
| | | RI{Amide} |
| 659 | Pra-[Nle6;Ser28]JzTx-V(1-29) | {H}-[Pra]YCQKW[Nle]W |
| | | TCDSKRACCEGLRCKLWCRK |
| | | SI{Amide} |
| 660 | Pra-[Nle6;Thr28]JzTx-V(1-29) | {H}-[Pra]YCQKW[Nle]W |
| | | TCDSKRACCEGLRCKLWCRK |
| | | TI{Amide} |
| 661 | Pra-[Nle6;Val28]JzTx-V(1-29) | {H}-[Pra]YCQKW[Nle]W |
| | | TCDSKRACCEGLRCKLWCRK |
| | | VI{Amide} |
| 662 | Pra-[Nle6;Trp28]JzTx-V(1-29) | {H}-[Pra]YCQKW[Nle]W |
| | | TCDSKRACCEGLRCKLWCRK |
| | | WI{Amide} |
| 663 | Pra-[Nle6;1-Nal28]JzTx-V(1-29) | {H}-[Pra]YCQKW[Nle]W |
| | | TCDSKRACCEGLRCKLWCRK |
| | | [1-Nal]I{Amide} |
| 664 | Pra-[Nle6,28]JzTx-V(1-29) | {H}-[Pra]YCQKW[Nle]W |
| | | TCDSKRACCEGLRCKLWCRK |
| | | [Nle]I{Amide} |
| 665 | Pra-[Nle6;Gln28]JzTx | {H}-[Pra]YCQKW[Nle]W |
| | | TCDSKRACCEGLRCKLWCRK |
| | | QI{Amide} |
| 666 | Pra-[Nle6;Ala20]JzTx-V(1-29) | {H}-[Pra]YCQKW[Nle]W |
| | | TCDSKRACCEGLACKLWCRK |
| | | II{Amide} |
| 667 | Pra-[Nle6;Asp20]JzTx-V(1-29) | {H}-[Pra]YCQKW[Nle]W |
| | | TCDSKRACCEGLDCKLWCRK |
| | | II{Amide} |
| 668 | Pra-[Nle6;Phe20]JzTx-V(1-29) | {H}-W[Pra]YCQKW[Nle] |
| | | WTCDSKRACCEGLFCKLWCR |
| | | KII{Amide} |
| 669 | Pra-[Nle6;Gly20]JzTx-V(1-29) | {H}-[Pra]YCQKW[Nle]W |
| | | TCDSKRACCEGLGCKLWCRK |
| | | II{Amide} |
| 670 | Pra-[Nle6;His20]JzTx-V(1-29) | {H}-[Pra]YCQKW[Nle]W |
| | | TCDSKRACCEGLHCKLWCRK |
| | | II{Amide} |
| 671 | Pra-[Nle6;Ile20]JzTx-V(1-29) | {H}-[Pra]YCQKW[Nle]W |
| | | TCDSKRACCEGLICKLWCRK |
| | | II{Amide} |
| 672 | Pra-[Nle6;Lys20]JzTx-V(1-29) | {H}-[Pra]YCQKW[Nle]W |
| | | TCDSKRACCEGLKCKLWCRK |
| | | II{Amide} |
| 673 | Pra-[Nle6;Leu20]JzTx-V(1-29) | {H}-W[Pra]YCQKW[Nle] |
| | | WTCDSKRACCEGLLCKLWCR |
| | | KII{Amide} |
| 674 | Pra-[Nle6,20]JzTx-V(1-29) | {H}-[Pra]YCQKW[Nle]W |
| | | TCDSKRACCEGL[Nle]CKL |
| | | WCRKII{Amide} |
| 675 | Pra-[Nle6;Asn20]JzTx-V(1-29) | {H}-[Pra]YCQKW[Nle]W |
| | | TCDSKRACCEGLNCKLWCRK |
| | | II{Amide} |
| 676 | Pra-[Nle6;Pro20]JzTx-V(1-29) | {H}-[Pra]YCQKW[Nle]W |
| | | TCDSKRACCEGLPCKLWCRK |
| | | II{Amide} |
| 677 | Pra-[Nle6;Gln20]JzTx-V(1-29) | {H}-[Pra]YCQKW[Nle]W |
| | | TCDSKRACCEGLQCKLWCRK |
| | | II{Amide} |
| 678 | Pra-[Nle6;Ser20]JzTx-V(1-29) | {H}-[Pra]YCQKW[Nle]W |
| | | TCDSKRACCEGLSCKLWCRK |
| | | II{Amide} |
| 679 | Pra-[Nle6;Thr20]JzTx-V(1-29) | {H}-W[Pra]YCQKW[Nle] |
| | | WTCDSKRACCEGLTCKLWCR |
| | | KII{Amide} |
| 680 | Pra-[Nle6;Val20]JzTx-V(1-29) | {H}-[Pra]YCQKW[Nle]W |
| | | TCDSKRACCEGLVCKLWCRK |
| | | II{Amide} |
| 681 | Pra-[Nle6;Trp20]JzTx-V(1-29) | {H}-[Pra]YCQKW[Nle]W |
| | | TCDSKRACCEGLWCKLWCRK |
| | | II{Amide} |
| 682 | Pra-[Nle6;Tyr20]JzTx-V(1-29) | {H}-[Pra]YCQKW[Nle]W |
| | | TCDSKRACCEGLYCKLWCRK |
| | | II{Amide} |
| 683 | Pra-[Nle6;1-Nal20]JzTx-V(1-29) | {H}-[Pra]YCQKW[Nle]W |
| | | TCDSKRACCEGL[1-Nal]C |
| | | KLWCRKII{Amide} |
| 684 | Pra-[Nle6;Asp20;Glu28]JzTx-V(1-29) | {H}-[Pra]YCQKW[Nle]W |
| | | TCDSKRACCEGLDCKLWCRK |
| | | EI{Amide} |
| 685 | Pra-[Nle6;Glu20,28]JzTx-V(1-29) | {H}-W[Pra]YCQKW[Nle] |
| | | WTCDSKRACCEGLECKLWCR |
| | | KEI{Amide} |
| 686 | Pra-[Nle6;Phe20;Glu28]JzTx-V(1-29) | {H}-[Pra]YCQKW[Nle]W |
| | | TCDSKRACCEGLFCKLWCRK |
| | | EI{Amide} |
| 687 | Pra-[Nle6;Gly20;Glu28]JzTx-V(1-29) | {H}-[Pra]YCQKW[Nle]W |
| | | TCDSKRACCEGLGCKLWCRK |
| | | EI{Amide} |
| 688 | Pra-[Nle6;His20;Glu28]JzTx-V(1-29) | {H}-[Pra]YCQKW[Nle]W |
| | | TCDSKRACCEGLHCKLWCRK |
| | | EI{Amide} |
| 689 | Pra-[Nle6;Ile20;Glu28]JzTx-V(1-29) | {H}-W[Pra]YCQKW[Nle] |
| | | WTCDSKRACCEGLICKLWCR |
| | | KEI{Amide} |
| 690 | Pra-[Nle6;Leu20;Glu28]JzTx-V(1-29) | {H}-[Pra]YCQKW[Nle]W |
| | | TCDSKRACCEGLLCKLWCRK |
| | | EI{Amide} |
| 691 | Pra-[Nle6,20;Glu28]JzTx-V(129) | {H}-W[Pra]YCQKW[Nle] |
| | | WTCDSKRACCEGL[Nle]CK |
| | | LWCRKEI{Amide} |
| 692 | Pra-[Nle6;Asn20;Glu28]JzTx-V(1-29) | {H}-[Pra]YCQKW[Nle]W |
| | | TCDSKRACCEGLNCKLWCRK |
| | | EI{Amide} |
| 693 | Pra-[Nle6;Pro20;Glu28]JzTx-V(1-29) | {H}-[Pra]YCQKW[Nle]W |
| | | TCDSKRACCEGLPCKLWCRK |
| | | EI{Amide} |
| 694 | Pra-[Nle6;Gln20;Glu28]JzTx-V(1-29) | {H}-[Pra]YCQKW[Nle]W |
| | | TCDSKRACCEGLQCKLWCRK |
| | | EI{Amide} |
| 695 | Pra-[Nle6;Ser20;Glu28]JzTx-V(1-29) | {H}-[Pra]YCQKW[Nle]W |
| | | TCDSKRACCEGLSCKLWCRK |
| | | EI{Amide} |
| 696 | Pra-[Nle6;Thr20;Glu28]JzTx-V(1-29) | {H}-[Pra]YCQKW[Nle]W |
| | | TCDSKRACCEGLTCKLWCRK |
| | | EI{Amide} |
| 697 | Pra-[Nle6;Val20;Glu28]JzTx-V(1-29) | {H}-[Pra]YCQKW[Nle]W |
| | | TCDSKRACCEGLVCKLWCRK |
| | | EI{Amide} |
| 698 | Pra-[Nle6;Trp20;Glu28]JzTx-V(1-29) | {H}-[Pra]YCQKW[Nle]W |
| | | TCDSKRACCEGLWCKLWCRK |
| | | EI{Amide} |
| 699 | Pra-[Nle6;Tyr20;Glu28]JzTx-V(1-29) | {H}-[Pra]YCQKW[Nle]W |
| | | TCDSKRACCEGLYCKLWCRK |
| | | EI{Amide} |
| 700 | Pra-[Nle6;1-Nal20;Glu28]JzTx-V(1-29) | {H}-[Pra]YCQKW[Nle]W |
| | | TCDSKRACCEGL[1-Nal]C |
| | | KLWCRKEI{Amide} |
| 701 | [Y3-I1;Nle6;Glu28]JzTx-V(1-29) | {H}-[Y3-I]CQKW[Nle]W |
| | | TCDSKRACCEGLRCKLWCRK |
| | | EI{Amide} |
| 702 | [Y3-I1;Nle6;1-Nal7,24;Glu28]JzTx-V(1-29) | {H}-[Y3-I]CQKW[Nle] |
| | | [1-Nal]TCDSKRACCEGLT |
| | | CKL[1-Nal]CRKEI |
| | | {Amide} |
| 703 | Pra-[Nle6;Ala19;Glu28]JzTx-V(1-29) | {H}-[Pra]YCQKW[Nle]W |
| | | TCDSKRACCEGARCKLWCRK |
| | | EI{Amide} |
| 704 | Pra-[Nle6;Lys19;Glu28]JzTx-V(1-29) | {H}-[Pra]YCQKW[Nle]W |
| | | TCDSKRACCEGKRCKLWCRK |
| | | EI{Amide} |
| 705 | Pra-[Nle6;Arg19;Glu28]JzTx-V(1-29) | {H}-[Pra]YCQKW[Nle]W |
| | | TCDSKRACCEGRRCKLWCRK |
| | | EI{Amide} |
| 706 | Pra-[Nle6;1-Nal19;Glu28]JzTx-V(1-29) | {H}-[Pra]YCQKW[Nle]W |
| | | TCDSKRACCEG[1-Nal]RC |
| | | KLWCRKEI{Amide} |
| 707 | Glu-Pra-[Nle6;Glu28]JzTx-V(1-29) | {H}-E[Pra]YCQKW[Nle] |
| | | WTCDSKRACCEGLRCKLWCR |
| | | KEI{Amide} |
| 708 | Glu-[Nle6;Glu28]JzTx-V(1-29) | {H}-EYCQKW[Nle]WTCDS |
| | | KRACCEGLRCKLWCRKEI |
| | | {Amide} |
| 709 | Pra-[Glu1,28;Nle6]JzTx-V(1-29) | {H}-[Pra]ECQKW[Nle]W |
| | | TCDSKRACCEGLRCKLWCRK |
| | | EI{Amide} |
| 710 | Pra-[Glu3,28;Nle6]JzTx-V(1-29) | {H}-W[Pra]YCEKW[Nle] |
| | | WTCDSKRACCEGLRCKLWCR |
| | | KEI{Amide} |
| 711 | Pra-[Glu4,28;Nle6]JzTx-V(1-29) | {H}-W[Pra]YCQEW[Nle] |
| | | WTCDSKRACCEGLRCKLWCR |
| | | KEI{Amide} |
| 712 | Pra-[Nle6;Glu8,28]JzTx-V(1-29) | {H}-[Pra]YCQKW[Nle]W |
| | | ECDSKRACCEGLRCKLWCRK |
| | | EI{Amide} |
| 713 | Pra-[Nle6;Glu10,28]JzTx-V(1-29) | {H}-W[Pra]YCQKW[Nle] |
| | | WTCESKRACCEGLRCKLWCR |
| | | KEI{Amide} |
| 714 | Pra-[Nle6;Glu11,28]JzTx-V(1-29) | {H}-W[Pra]YCQKW[Nle] |
| | | WTCDEKRACCEGLRCKLWCR |
| | | KEI{Amide} |
| 715 | Pra-[Nle6;Glu12,28]JzTx-V(1-29) | {H}-[Pra]YCQKW[Nle]W |
| | | TCDSERACCEGLRCKLWCRK |
| | | EI{Amide} |
| 716 | Pra-[Nle6;Glu13,28]JzTx-V(1-29) | {H}-W[Pra]YCQKW[Nle] |
| | | WTCDSKEACCEGLRCKLWCR |
| | | KEI{Amide} |
| 717 | Pra-[Nle6;Glu14,28]JzTx-V(1-29) | {H}-[Pra]YCQKW[Nle]W |
| | | TCDSKRECCEGLRCKLWCRK |
| | | EI{Amide} |
| 718 | Pra-[Nle6;Lys17;Glu28]JzTx-V(1-29) | {H}-[Pra]YCQKW[Nle]W |
| | | TCDSKRACCKGLRCKLWCRK |
| | | EI{Amide} |
| 719 | Pra-[Nle6;Glu18,28]JzTx-V(1-29) | {H}-[Pra]YCQKW[Nle]W |
| | | TCDSKRACCEELRCKLWCRK |
| | | EI{Amide} |
| 720 | Pra-[Nle6;Glu19,28]JzTx-V(1-29) | {H}-[Pra]YCQKW[Nle]W |
| | | TCDSKRACCEGERCKLWCRK |
| | | EI{Amide} |
| 721 | Pra-[Nle6;Lys20;Glu28]JzTx-V(1-29) | {H}-[Pra]YCQKW[Nle]W |
| | | TCDSKRACCEGLKCKLWCRK |
| | | EI{Amide} |
| 722 | Pra-[Nle6;Glu22,28]JzTx-V(1-29) | {H}-W[Pra]YCQKW[Nle] |
| | | WTCDSKRACCEGLRCELWCR |
| | | KEI{Amide} |
| 723 | Pra-[Nle6;Asp28]JzTx-V(1-29) | {H}-[Pra]YCQKW[Nle]W |
| | | TCDSKRACCEGLRCKLWCRK |
| | | DI{Amide} |
| 724 | Pra-[Nle6;Glu26,28]JzTx-V(1-29) | {H}-[Pra]YCQKW[Nle]W |
| | | TCDSKRACCEGLRCKLWCEK |
| | | EI{Amide} |
| 725 | Pra-[Nle6;Glu27,28]JzTx-V(1-29) | {H}-[Pra]YCQKW[Nle]W |
| | | TCDSKRACCEGLRCKLWCRE |
| | | EI{Amide} |
| 726 | Pra-[Nle6;Glu28]JzTx-V(1-29)-Glu | {H}-[Pra]YCQKW[Nle]W |
| | | TCDSKRACCEGLRCKLWCRK |
| | | EIE{Amide} |
| 727 | Pra-[Nle6;Ala20;Glu28]JzTx-V(1-29) | {H}-[Pra]YCQKW[Nle]W |
| | | TCDSKRACCEGLACKLWCRK |
| | | EI{Amide} |
| 728 | Pra-[Nle6;Glu12,28;Lys17]JzTx-V(1-29) | {H}-[Pra]YCQKW[Nle]W |
| | | TCDSERACCKGLRCKLWCRK |
| | | EI{Amide} |
| 729 | Pra-[Nle6;Glu12;Lys17]JzTx-V(1-29) | {H}-[Pra]YCQKW[Nle]W |
| | | TCDSERACCKGLRCKLWCRK |
| | | II{Amide} |
| 730 | Pra-[Nle6;Glu12]JzTx-V(1-29) | {H}-[Pra]YCQKW[Nle]W |
| | | TCDSERACCEGLRCKLWCRK |
| | | II{Amide} |
| 731 | [Nle6;Glu28]JzTx-V(2-29) | {H}-CQKW[Nle]WTCDSK |
| | | (ivDde)RACCEGLRCKLWC |
| | | RKEI{Amide} |
| 732 | CyA-[Nle6;Glu12,28;Pra17]JzTx-V(1-29) | {H}-[CyA]YCQKW[Nle]W |
| | | TCDSERACC[Pra]GLRCKL |
| | | WCRKEI{Amide} |
| 733 | CyA-[Nle6;Glu14,28;Pra17]JzTx-V(1-29) | {H}-[CyA]YCQKW[Nle]W |
| | | TCDSKRECC[Pra]GLRCKL |
| | | WCRKEI{Amide} |
| 734 | Glu-Pra-[Nle6;Glu11,28]JzTx-V(1-29) | {H}-E[Pra]YCQKW[Nle] |
| | | WTCDEKRACCEGLRCKLWCR |
| | | KEI{Amide} |
| 735 | Glu-Pra-[Nle6;Glu12,28]JzTx-V(1-29) | {H}-E[Pra]YCQKW[Nle] |
| | | WTCDSERACCEGLRCKLWCR |
| | | KEI{Amide} |
| 736 | Glu-[Pra1;Nle6;Glu11,28]JzTx-V(1-29) | {H}-E[Pra]CQKW[Nle]W |
| | | TCDEKRACCEGLRCKLWCRK |
| | | EI{Amide} |
| 737 | Glu-[Pra1;Nle6;Glu12,28]JzTx-V(1-29) | {H}-E[Pra]CQKW[Nle]W |
| | | TCDSERACCEGLRCKLWCRK |
| | | EI{Amide} |
| 738 | Glu-[Pra1;Nle6;Glu14,28]JzTx-V(1-29) | {H}-E[Pra]CQKW[Nle]W |
| | | TCDSKRECCEGLRCKLWCRK |
| | | EI{Amide} |
| 739 | Pra-[Glu1,11,28;Nle6]JzTx-V(1-29) | {H}-[Pra]ECQKW[Nle]W |
| | | TCDEKRACCEGLRCKLWCRK |
| | | EI{Amide} |
| 740 | Glu-Pra-[Nle6;Glu14,28]JzTx-V(1-29) | {H}-E[Pra]YCQKW[Nle] |
| | | WTCDSKRECCEGLRCKLWCR |
| | | KEI{Amide} |
| 741 | Glu-Pra-[Glu1,11,28;Nle6]JzTx-V(1-29) | {H}-E[Pra]ECQKW[Nle] |
| | | WTCDEKRACCEGLRCKLWCR |
| | | KEI{Amide} |
| 742 | Pra-[Glu1,12,28;Nle6]JzTx-V(1-29) | {H}-[Pra]ECQKW[Nle]W |
| | | TCDSERACCEGLRCKLWCRK |
| | | EI{Amide} |
| 743 | Pra-[Glu1,14,28;Nle6]JzTx-V(1-29) | {H}-[Pra]ECQKW[Nle]W |
| | | TCDSKRECCEGLRCKLWCRK |
| | | EI{Amide} |
| 744 | Pra-[Nle6;Glu11,12,28]JzTx-V(1-29) | {H}-[Pra]YCQKW[Nle]W |
| | | TCDEERACCEGLRCKLWCRK |
| | | EI{Amide} |
| 745 | Pra-[Nle6;Glu11,14,28]JzTx-V(1-29) | {H}-[Pra]YCQKW[Nle]W |
| | | TCDEKRECCEGLRCKLWCRK |
| | | EI{Amide} |
| 746 | Glu-Pra-[Glu1,12,28;Nle6]JzTx-V(1-29) | {H}-E[Pra]ECQKW[Nle] |
| | | WTCDSERACCEGLRCKLWCR |
| | | KEI{Amide} |
| 747 | Pra-[Nle6;Glu12,14,28]JzTx-V(1-29) | {H}-[Pra]YCQKW[Nle]W |
| | | TCDSERECCEGLRCKLWCRK |
| | | EI{Amide} |
| 748 | Glu-[Pra1;Nle6;Glu11,12,28]JzTx-V(1-29) | {H}-E[Pra]CQKW[Nle]W |
| | | TCDEERACCEGLRCKLWCRK |
| | | EI{Amide} |
| 749 | Glu-[Pra1;Nle6;Glu12,14,28]JzTx-V(1-29) | {H}-E[Pra]CQKW[Nle]W |
| | | TCDSERECCEGLRCKLWCRK |
| | | EI{Amide} |
| 750 | Glu-[Pra1;Nle6;Glu11,14,28]JzTx-V(1-29) | {H}-E[Pra]CQKW[Nle]W |
| | | TCDEKRECCEGLRCKLWCRK |
| | | EI{Amide} |
| 751 | Pra-[Glu1,11,14,28;Nle6]JzTx-V(1-29) | {H}-[Pra]ECQKW[Nle]W |
| | | TCDEKRECCEGLRCKLWCRK |
| | | EI{Amide} |
| 752 | Glu-Pra-[Glu1,14,28;Nle6]JzTx-V(1-29) | {H}-E[Pra]ECQKW[Nle] |
| | | WTCDSKRECCEGLRCKLWCR |
| | | KEI{Amide} |
| 753 | Pra-[Glu1,12,14,28;Nle6]JzTx-V(1-29) | {H}-[Pra]ECQKW[Nle]W |
| | | TCDSERECCEGLRCKLWCRK |
| | | EI{Amide} |
| 754 | Pra-[Glu1,11,12,28;Nle6]JzTx-V(1-29) | {H}-[Pra]ECQKW[Nle]W |
| | | TCDEERACCEGLRCKLWCRK |
| | | EI{Amide} |
| 755 | Pra-[Nle6;Glu11,12,14,28]JzTx-V(1-29) | {H}-[Pra]YCQKW[Nle]W |
| | | TCDEERECCEGLRCKLWCRK |
| | | EI{Amide} |
| 756 | CyA-[Glu1,12,14,28;Nle6;Pra17] | {H}-[CyA]ECQKW[Nle]W |
| | JzTx-V(1-29) | TCDSERECC[Pra]GLRCKL |
| | | WCRKEI{Amide} |
| 757 | CyA-[Glu1,11,12,14,28;Nle6;Pra17] | {H}-[CyA]ECQKW[Nle]W |
| | JzTx-V(1-29) | TCDEERECC[Pra]GLRCKL |
| | | WCRKEI{Amide} |
| 758 | CyA-[Nle6;Pra17]JzTx-V(1-29) | {H}-[CyA]YCQKW[Nle]W |
| | | TCDSKRACC[Pra]GLRCKL |
| | | WCRKII{Amide} |
| 759 | CyA-[Nle6;Glu12;Pra17]JzTx-V(1-29) | {H}-[CyA]YCQKW[Nle]W |
| | | TCDSERACC[Pra]GLRCKL |
| | | WCRKII{Amide} |
| 760 | CyA-[Nle6;Glu14;Pra17]JzTx-V(1-29) | {H}-[CyA]YCQKW[Nle]W |
| | | TCDSKRECC[Pra]GLRCKL |
| | | WCRKII{Amide} |
| 761 | CyA-[Nle6;Pra17;Glu27]JzTx-V(1-29) | {H}-[CyA]YCQKW[Nle]W |
| | | TCDSKRACC[Pra]GLRCKL |
| | | WCREII{Amide} |
| 762 | Nva-[Nle6;Glu12,14;Pra17]JzTx-V(1-29) | {H}-[Nva]YCQKW[Nle]W |
| | | TCDSERECC[Pra]GLRCKL |
| | | WCRKII{Amide} |
| 763 | CyA-[Nle6;Glu12,27;Pra17]JzTx-V(1-29) | {H}-[CyA]YCQKW[Nle]W |
| | | TCDSERACC[Pra]GLRCKL |
| | | WCREII{Amide} |
| 764 | CyA-[Nle6;Pra17;Glu27,28]JzTx-V(1-29) | {H}-[CyA]YCQKW[Nle]W |
| | | TCDSKRACC[Pra]GLRCKL |
| | | WCREEI{Amide} |
| 765 | CyA-[Nle6;Glu11,28;Pra17]JzTx-V(1-29) | {H}-[CyA]YCQKW[Nle]W |
| | | TCDEKRACC[Pra]GLRCKL |
| | | WCRKEI{Amide} |
| 766 | Glu-[CyA1;Nle6;Glu11,28;Pra17PzTx-V(1-29) | {H}-E[CyA]CQKW[Nle]W |
| | | TCDEKRACC[Pra]GLRCKL |
| | | WCRKEI{Amide} |
| 767 | Glu-[Nle6;Glu11,28;Pra17]JzTx-V(1-29) | {H}-EYCQKW[Nle]WTCDE |
| | | KRACC[Pra]GLRCKLWCRK |
| | | EI{Amide} |
| 768 | CyA-[Glu1,11,28;Nle6;Pra17]JzTx-V(1-29) | {H}-[CyA]ECQKW[Nle]W |
| | | TCDEKRACC[Pra]GLRCKL |
| | | WCRKEI{Amide} |
| 769 | Glu-Nva-[Nle6;Glu11,28;Pra17] | {H}-E[Nva]YCQKW[Nle] |
| | JzTx-V(1-29) | WTCDEKRACC[Pra]GLRCK |
| | | LWCRKEI{Amide} |
| 770 | Nva-[Glu1,14,28;Nle6;Pra17]JzTx-V(1-29) | {H}-[Nva]ECQKW[Nle]W |
| | | TCDSKRECC[Pra]GLRCKL |
| | | WCRKEI{Amide} |
| 771 | CyA-[Glu1,14,28;Nle6;Pra17]JzTx-V(1-29) | {H}-[CyA]ECQKW[Nle]W |
| | | TCDSKRECC[Pra]GLRCKL |
| | | WCRKEI{Amide} |
| 772 | Glu-Nva-[Glu1,11,28;Nle6;Pra17] | {H}-E[Nva]ECQKW[Nle] |
| | JzTx-V(1-29) | WTCDEKRACC[Pra]GLRCK |
| | | LWCRKEI{Amide} |
| 773 | Glu-[Nva1;Nle6;Glu14,28;Pra17] | {H}-E[Nva]CQKW[Nle]W |
| | JzTx-V(1-29) | TCDSKRECC[Pra]GLRCKL |
| | | WCRKEI{Amide} |
| 774 | Glu-[Nva1;Nle6;Glu11,28;Pra17] | {H}-E[Nva]CQKW[Nle]W |
| | JzTx-V(1-29) | TCDEKRACC[Pra]GLRCKL |
| | | WCRKEI{Amide} |
| 775 | Pra-[Nle6;Cit13;Glu28]JzTx-V(1-29) | {H}-[Pra]YCQKW[Nle]W |
| | | TCDSK[Cit]ACCEGLRCKL |
| | | WCRKEI{Amide} |
| 776 | Pra-[BhGln4;Nle6;Glu28]JzTx-V(1-29) | {H}-[Pra]YCQ[BhGln]W |
| | | [Nle]WTCDSKRACCEGLRC |
| | | KLWCRKEI{Amide} |
| 777 | Pra-[Nle6;BhGln12;Glu28]JzTx-V(1-29) | {H}-[Pra]YCQKW[Nle]W |
| | | TCDS[BhGln]RACCEGLRC |
| | | KLWCRKEI{Amide} |
| 778 | Pra-[Nle6;BhGln13;Glu28]JzTx-V(1-29) | {H}-[Pra]YCQKW[Nle]W |
| | | TCDSK[BhGln]ACCEGLRC |
| | | KLWCRKEI{Amide} |
| 779 | Pra-[Nle6;BhGln20;Glu28]JzTx-V(1-29) | {H}-[Pra]YCQKW[Nle]W |
| | | TCDSKRACCEGL[BhGln]C |
| | | KLWCRKEI{Amide} |
| 780 | Pra-[Nle6;BhGln22;Glu28]JzTx-V(1-29) | {H}-[Pra]YCQKW[Nle]W |
| | | TCDSKRACCEGLRC |
| | | [BhGln]LWCRKEI |
| 781 | Pra-[Nle6;BhGln26;Glu28]JzTx-V(1-29) | {Amide} |
| | | {H}-[Pra]YCQKW[Nle]W |
| | | TCDSKRACCEGLRCKLWC |
| | | [BhGln]KEI{Amide} |
| 782 | Pra-[Nle6;BhGln27;Glu28]JzTx-V(1-29) | {H}-[Pra]YCQKW[Nle]W |
| | | TCDSKRACCEGLRCKLWCR |
| | | [BhGln]EI{Amide} |
| 783 | Pra-[BhGln4;Nle6;Cit13;Glu28] | {H}-[Pra]YCQ[BhGln]W |
| | JzTx-V(1-29) | [Nle]WTCDSK[Cit]ACCE |
| | | GLRCKLWCRKEI{Amide} |
| 784 | Pra-[BhGln4;Nle6;Cit20;Glu28] | {H}-[Pra]YCQ[BhGln]W |
| | JzTx-V(1-29) | [Nle]WTCDSKRACCEGL |
| | | [Cit]CKLWCRKEI |
| | | {Amide} |
| 785 | Pra-[BhGln4;Nle6;Cit26;Glu28] | {H}-[Pra]YCQ[BhGln]W |
| | JzTx-V(1-29) | [Nle]WTCDSKRACCEGLRC |
| | | KLWC[Cit]KEI{Amide} |
| 786 | Pra-[Nle6;BhGln12;Cit13;Glu28] | {H}-[Pra]YCQKW[Nle]W |
| | JzTx-V(1-29) | TCDS[BhGln][Cit]ACCE |
| | | GLRCKLWCRKEI{Amide} |
| 787 | Pra-[Nle6;BhGln12;Cit20;Glu28] | {H}-[Pra]YCQKW[Nle]W |
| | JzTx-V(1-29) | TCDS[BhGln]RACCEGL |
| | | [Cit]CKLWCRKEI |
| | | {Amide} |
| 788 | Pra-[Nle6;BhGln12;Cit26;Glu28] | {H}-[Pra]YCQKW[Nle]W |
| | JzTx-V(1-29) | TCDS[BhGln]RACCEGLRC |
| | | KLWC[Cit]KEI{Amide} |
| 789 | Pra-[Nle6;Cit13;BhGln22;Glu28] | {H}-[Pra]YCQKW[Nle]W |
| | JzTx-V(1-29) | TCDSK[Cit]ACCEGLRC |
| | | [BhGln]LWCRKEI |
| | | {Amide} |
| 790 | Pra-[Nle6;Cit20;BhGln22;Glu28] | {H}-[Pra]YCQKW[Nle]W |
| | JzTx-V(1-29) | TCDSKRACCEGL[Cit]C |
| | | [BhGln]LWCRKEI |
| | | {Amide} |
| 791 | Pra-[Nle6;BhGln22;Cit26;Glu28] | {H}-[Pra]YCQKW[Nle]W |
| | JzTx-V(1-29) | TCDSKRACCEGLRC |
| | | [BhGln]LWC[Cit]KEI |
| | | {Amide} |
| 792 | Pra-[Nle6;Cit13;BhGln27;Glu28] | {H}-[Pra]YCQKW[Nle]W |
| | JzTx-V(1-29) | TCDSK[Cit]ACCEGLRCKL |
| | | WCR[BhGln]EI{Amide} |
| 793 | Pra-[Nle6;Cit20;BhGln27;Glu28] | {H}-[Pra]YCQKW[Nle]W |
| | JzTx-V(1-29) | TCDSKRACCEGL[Cit]CKL |
| | | WCR[BhGln]EI{Amide} |
| 794 | Pra-[Nle6;Cit26;BhGln27;Glu28] | {H}-[Pra]YCQKW[Nle]W |
| | JzTx-V(1-29) | TCDSKRACCEGLRCKLWC |
| | | [Cit][BhGln]EI |
| | | {Amide} |
| 795 | Pra-[Nle6;Cit20;Glu28]JzTx-V(1-29) | {H}-[Pra]YCQKW[Nle]W |
| | | TCDSKRACCEGL[Cit]CKL |
| | | WCRKEI{Amide} |
| 796 | Pra-[Nle6;Cit26;Glu28]JzTx-V(1-29) | {H}-[Pra]YCQKW[Nle]W |
| | | TCDSKRACCEGLRCKLWC |
| | | [Cit]KEI{Amide} |
| 797 | Pra-[Nle6;Cit13,20;Glu28]JzTx-V(1-29) | {H}-[Pra]YCQKW[Nle]W |
| | | TCDSK[Cit]ACCEGL |
| | | [Cit]CKLWCRKEI |
| | | {Amide} |
| 798 | Pra-[Nle6;Cit13,26;Glu28]JzTx-V(1-29) | {H}-[Pra]YCQKW[Nle]W |
| | | TCDSK[Cit]ACCEGLRCKL |
| | | WC[Cit]KEI{Amide} |
| 799 | Pra-[Nle6;Cit20,26;Glu28]JzTx-V(1-29) | {H}-[Pra]YCQKW[Nle]W |
| | | TCDSKRACCEGL[Cit]CKL |
| | | WC[Cit]KEI{Amide} |
| 800 | Pra-[Nle6;Cit13,20,26;Glu28] | {H}-[Pra]YCQKW[Nle]W |
| | JzTx-V(1-29) | TCDSK[Cit]ACCEGL |
| | | [Cit]CKLWC[Cit]KEI |
| | | {Amide} |
| 801 | Pra-[Gln4;Nle6;Glu28]JzTx-V(1-29) | {H}-[Pra]YCQQW[Nle]W |
| | | TCDSKRACCEGLRCKLWCRK |
| | | EI{Amide} |
| 802 | Pra-[Nle6;Gln12;Glu28]JzTx-V(1-29) | {H}-[Pra]YCQKW[Nle]W |
| | | TCDSQRACCEGLRCKLWCRK |
| | | EI{Amide} |
| 803 | Pra-[Nle6;Gln13;Glu28]JzTx-V(1-29) | {H}-[Pra]YCQKW[Nle]W |
| | | TCDSKQACCEGLRCKLWCRK |
| | | EI{Amide} |
| 804 | Pra-[Nle6;Gln22;Glu28]JzTx-V(1-29) | {H}-[Pra]YCQKW[Nle]W |
| | | TCDSKRACCEGLRCQLWCRK |
| | | EI{Amide} |
| 805 | Pra-[Nle6;Gln26;Glu28]JzTx-V(1-29) | {H}-[Pra]YCQKW[Nle]W |
| | | TCDSKRACCEGLRCKLWCQK |
| | | EI{Amide} |
| 806 | Pra-[Nle6;Gln27;Glu28]JzTx-V(1-29) | {H}-[Pra]YCQKW[Nle]W |
| | | TCDSKRACCEGLRCKLWCRQ |
| | | EI{Amide} |
| 807 | Pra-[Gln4;Nle6;Cit13;Glu28]JzTx-V(1-29) | {H}-[Pra]YCQQW[Nle]W |
| | | TCDSK[Cit]ACCEGLRCKL |
| | | WCRKEI{Amide} |
| 808 | Pra-[Gln4;Nle6;Cit20;Glu28]JzTx-V(1-29) | {H}-[Pra]YCQQW[Nle]W |
| | | TCDSKRACCEGL[Cit]CKL |
| | | WCRKEI{Amide} |
| 809 | Pra-[Gln4;Nle6;Cit26;Glu28]JzTx-V(1-29) | {H}-[Pra]YCQQW[Nle]W |
| | | TCDSKRACCEGLRCKLWC |
| | | [Cit]KEI{Amide} |
| 810 | Pra-[Nle6;Gln12;Cit13;Glu28]JzTx-V(1-29) | {H}-[Pra]YCQKW[Nle]W |
| | | TCDSQ[Cit]ACCEGLRCKL |
| | | WCRKEI{Amide} |
| 811 | Pra-[Nle6;Gln12;Cit20;Glu28]JzTx-V(1-29) | {H}-[Pra]YCQKW[Nle]W |
| | | TCDSQRACCEGL[Cit]CKL |
| | | WCRKEI{Amide} |
| 812 | Pra-[Nle6;Cit20;Gln27;Glu28]JzTx-V(1-29) | {H}-[Pra]YCQKW[Nle]W |
| | | TCDSKRACCEGL[Cit]CKL |
| | | WCRQEI{Amide} |
| 813 | Pra-[Nle6;Cit26;Gln27;Glu28]JzTx-V(1-29) | {H}-[Pra]YCQKW[Nle]W |
| | | TCDSKRACCEGLRCKLWC |
| | | [Cit]QEI{Amide} |
| 814 | Pra-[Nle6;Gln12;Cit26;Glu28]JzTx-V(1-29) | {H}-[Pra]YCQKW[Nle]W |
| | | TCDSQRACCEGLRCKLWC |
| | | [Cit]KEI{Amide} |
| 815 | Pra-[Nle6;Cit13;Gln27;Glu28]JzTx-V(1-29) | {H}-[Pra]YCQKW[Nle]W |
| | | TCDSK[Cit]ACCEGLRCKL |
| | | WCRQEI{Amide} |
| 816 | Pra-[Nle6;Cit13;Gln22;Glu28]JzTx-V(1-29) | {H}-[Pra]YCQKW[Nle]W |
| | | TCDSK[Cit]ACCEGLRCQL |
| | | WCRKEI{Amide} |
| 817 | Pra-[Nle6;Cit20;Gln22;Glu28]JzTx-V(1-29) | {H}-[Pra]YCQKW[Nle]W |
| | | TCDSKRACCEGL[Cit]CQL |
| | | WCRKEI{Amide} |
| 818 | Pra-[Nle6;Gln22;Cit26;Glu28]JzTx-V(1-29) | {H}-[Pra]YCQKW[Nle]W |
| | | TCDSKRACCEGLRCQLWC |
| | | [Cit]KEI{Amide} |
| 819 | CyA-[Nle6;Ala12;Pra17;Glu28]JzTx-V(1-29) | {H}-[CyA]YCQKW[Nle]W |
| | | TCDSARACC[Pra]GLRCKL |
| | | WCRKEI{Amide} |
| 820 | CyA-[Nle6;Pra17;Asp18;Glu28]JzTx-V(1-29) | {H}-[CyA]YCQKW[Nle]W |
| | | TCDSKRACC[Pra]DLRCKL |
| | | WCRKEI{Amide} |
| 821 | CyA-[Nle6;Pra17;Val20;Glu28]JzTx-V(1-29) | {H}-[CyA]YCQKW[Nle]W |
| | | TCDSKRACC[Pra]GLVCKL |
| | | WCRKEI{Amide} |
| 822 | CyA-[Nle6;Pra17;Gln22;Glu28]JzTx-V(1-29) | {H}-[CyA]YCQKW[Nle]W |
| | | TCDSKRACC[Pra]GLRCQL |
| | | WCRKEI{Amide} |
| 823 | CyA-[Nle6;Pra17;Tyr27;Glu28]JzTx-V(1-29) | {H}-[CyA]YCQKW[Nle]W |
| | | TCDSKRACC[Pra]GLRCKL |
| | | WCRYEI{Amide} |
| 824 | CyA-[Nle6;Pra17;Leu27;Glu28]JzTx-V(1-29) | {H}-[CyA]YCQKW[Nle]W |
| | | TCDSKRACC[Pra]GLRCKL |
| | | WCRLEI{Amide} |
| 825 | Pra-[Nle6]JzTx45(1-29) | {H}-[Pra]YCQKW[Nle]W |
| | | TCDSERKCCEGYVCELWCKY |
| | | NL{Amide} |
| 826 | [Nle6,Pra17]JzTx45(1-29) | {H}-YCQKW[Nle]WTCDSE |
| | | RKCC[Pra]GYVCELWCKYN |
| | | L{Amide} |
| 827 | Pra-[Nle6]JzTx-V(1-29)-FreeAcid | {H}-[Pra]YCQKW[Nle]W |
| | | TCDSKRACCEGLRCKLWCRK |
| | | II{FreeAcid} |
| 828 | Pra-[Nle6;Glu28]JzTx-V(1-29)- | {H}-[Pra]YCQKW[Nle]W |
| | Gly-FreeAcid | TCDSKRACCEGLRCKLWCRK |
| | | EIG{FreeAcid} |
| 829 | Pra[Nle6;Glu28]JzTx-V(1-29)-FreeAcid | {H}-[Pra]YCQKW[Nle]W |
| | | TCDSKRACCEGLRCKLWCRK |
| | | EI{FreeAcid} |
| 830 | CyA-[Nle6;Pra17;Lys26,28;Leu29] | {H}-[CyA]YCQKW[Nle]W |
| | JzTx-V(1-29)-Trp-FreeAcid | TCDSKRACC[Pra]GLRCKL |
| | | WCKKKLW{FreeAcid} |
| 831 | CyA-[Nle6;Pra17;Glu28]JzTx-V(1-29)- | {H}-[CyA]YCQKW[Nle]W |
| | Glu-Glu-Gly-FreeAcid | TCDSKRACC[Pra]GLRCKL |
| | | WCRKEIEEG{FreeAcid} |
| 832 | CyA-[Nle6;Pra17;Lys28]JzTx-V(1-29)- | {H}-[CyA]YCQKW[Nle]W |
| | Glu-Glu-Gly-FreeAcid | TCDSKRACC[Pra]GLRCKL |
| | | WCRKKIEEG{FreeAcid} |
| 833 | CyA-[Nle6;Pra17;Glu28]JzTx-V(1-29)- | {H}-[CyA]YCQKW[Nle]W |
| | Glu-Trp-FreeAcid | TCDSKRACC[Pra]GLRCKL |
| | | WCRKEIEW{FreeAcid} |
| 834 | CyA-[Nle6;Pra17;Lys28]JzTx-V(1-29)- | {H}-[CyA]YCQKW[Nle]W |
| | Glu-Trp-FreeAcid | TCDSKRACC[Pra]GLRCKL |
| | | WCRKKIEW{FreeAcid} |
| 835 | Pra-[SeC2,16;Nle6;Glu12,28]JzTx-V(1-29) | {H}-[Pra]Y[SeC]QKW |
| | | [Nle]WTCDSERAC[SeC]E |
| | | GLRCKLWCRKEI{Amide} |
| 836 | Pra-[Nle6;SeC9,21;Glu12,28]JzTx-V(1-29) | {H}-[Pra]YCQKW[Nle]W |
| | | T[SeC]DSERACCEGLR |
| | | [SeC]KLWCRKEI{Amide} |
| 837 | Pra-[Nle6;Glu12,28;SeC15,25]JzTx-V(1-29) | {H}-[Pra]YCQKW[Nle]W |
| | | TCDSERA[SeC]CEGLRCKL |
| | | W[SeC]RKEI{Amide} |
| 838 | Pra-[SeC2,16;Nle6;Glu28]JzTx-V(1-29) | {H}-[Pra]Y[SeC]QKW |
| | | [Nle]WTCDSKRAC[SeC]E |
| | | GLRCKLWCRKEI{Amide} |
| 839 | Pra-[Nle6;SeC9,21;Glu28]JzTx-V(1-29) | {H}-[Pra]YCQKW[Nle]W |
| | | T[SeC]DSKRACCEGLR |
| | | [SeC]KLWCRKEI{Amide} |
| 840 | Pra-[Nle6;SeC15,25;Glu28]JzTx-V(1-29) | {H}-[Pra]YCQKW[Nle]W |
| | | TCDSKRA[SeC]CEGLRCKL |
| | | W[SeC]RKEI{Amide} |
| 841 | Pra-[1-Nal5;Nle6;Glu28]JzTx-V(1-29) | {H}-[Pra]YCQK[1-Nal] |
| | | [Nle]WTCD SKRACCEGLR |
| | | CKLWCRKEI{Amide} |
| 842 | Pra-[2-Nal5;Nle6;Glu28]JzTx-V(1-29) | {H}-[Pra]YCQK[2-Nal] |
| | | [Nle]WTCD SKRACCEGLR |
| | | CKLWCRKEI{Amide} |
| 843 | Pra-[Phe5;Nle6;Glu28]JzTx-V(1-29) | {H}-[Pra]YCQKF[Nle]W |
| | | TCDSKRACCEGLRCKLWCRK |
| | | EI{Amide} |
| 844 | Pra-[hPhe5;Nle6;Glu28]JzTx-V(1-29) | {H}-[Pra]YCQK[hPhe] |
| | | [Nle]WTCDSKRACCEGLRC |
| | | KLWCRKEI{Amide} |
| 845 | Pra-[5-BrW5;Nle6;Glu28]JzTx-V(1-29) | {H}-[Pra]YCQK[5-BrW] |
| | | [Nle]WTCDSKRACCEGLRC |
| | | KLWCRKEI{Amide} |
| 846 | Pra-[Nle6;1-Nal7;Glu28]JzTx-V(1-29) | {H}-[Pra]YCQKW[Nle] |
| | | [1-Nal]TCDSKRACCEGLR |
| | | CKLWCRKEI{Amide} |
| 847 | Pra-[Nle6;2-Nal7;Glu28]JzTx-V(1-29) | {H}-[Pra]YCQKW[Nle] |
| | | [2-Nal]TCDSKRACCEGLR |
| | | CKLWCRKEI{Amide} |
| 848 | Pra-[Nle6;Phe7;Glu28]JzTx-V(1-29) | {H}-[Pra]YCQKW[Nle]F |
| | | TCDSKRACCEGLRCKLWCRK |
| | | EI{Amide} |
| 849 | Pra-[Nle6;hPhe7;Glu28]JzTx-V(1-29) | {H}-[Pra]YCQKW[Nle] |
| | | [hPhe]TCDSKRACCEGLRC |
| | | KLWCRKEI{Amide} |
| 850 | Pra-[Nle6;5-BrW7;Glu28]JzTx-V(1-29) | {H}-[Pra]YCQKW[Nle] |
| | | [5-BrW]TCDSKRACCEGLR |
| | | CKLWCRKEI{Amide} |
| 851 | Pra-[Nle6;1-Nal24;Glu28]JzTx-V(1-29) | {H}-[Pra]YCQKW[Nle]W |
| | | TCDSKRACCEGLRCKL |
| | | [1-Nal]CRKEI{Amide} |
| 852 | Pra-[Nle6;2-Nal24;Glu28]JzTx-V(1-29) | {H}-[Pra]YCQKW[Nle]W |
| | | TCDSKRACCEGLRCKL |
| | | [2-Nal]CRKEI{Amide} |
| 853 | Pra-[Nle6;Phe24;Glu28]JzTx-V(1-29) | {H}-[Pra]YCQKW[Nle]W |
| | | TCDSKRACCEGLRCKLFCRK |
| | | EI{Amide} |
| 854 | Pra-[Nle6;hPhe24;Glu28]JzTx-V(1-29) | {H}-[Pra]YCQKW[Nle]W |
| | | TCDSKRACCEGLRCKL |
| | | [hPhe]CRKEI{Amide} |
| 855 | Pra-[Nle6;Ile23;Glu28]JzTx-V(1-29) | {H}-[Pra]YCQKW[Nle]W |
| | | TCDSKRACCEGLRCKIWCRK |
| | | EI{Amide} |
| 856 | Pra-[Nle6,23;Glu28]JzTx-V(1-29) | {H}-[Pra]YCQKW[Nle]W |
| | | TCDSKRACCEGLRCK[Nle] |
| | | WCRKEI{Amide} |
| 857 | Pra-[Nle6;Nva23;Glu28]JzTx-V(1-29) | {H}-[Pra]YCQKW[Nle]W |
| | | TCDSKRACCEGLRCK[Nva] |
| | | WCRKEI{Amide} |
| 858 | Pra-[Nle6;5-BrW24;Glu28]JzTx-V(1-29) | {H}-[Pra]YCQKW[Nle]W |
| | | TCDSKRACCEGLRCKL |
| | | [5-BrW]CRKEI{Amide} |
| 859 | Pra-[Nle6;Chg23;Glu28]JzTx-V(1-29) | {H}-[Pra]YCQKW[Nle]W |
| | | TCDSKRACCEGLRCK[Chg] |
| | | WCRKEI{Amide} |
| 860 | Pra-[Nle6;Cha23;Glu28]JzTx-V(1-29) | {H}-[Pra]YCQKW[Nle]W |
| | | TCDSKRACCEGLRCK[Cha] |
| | | WCRKEI{Amide} |
| 861 | Pra-[Nle6;Glu28;Phe29]JzTx-V(1-29) | {H}-[Pra]YCQKW[Nle]W |
| | | TCDSKRACCEGLRCKLWCRK |
| | | EF{Amide} |
| 862 | Pra-[Nle6;Glu28;Cha29]JzTx-V(1-29) | {H}-[Pra]YCQKW[Nle]W |
| | | TCDSKRACCEGLRCKLWCRK |
| | | E[Cha]{Amide} |
| 863 | Pra-[Phe6;Glu28]JzTx-V(1-29) | {H}-[Pra]YCQKWFWTCDS |
| | | KRACCEGLRCKLWCRKEI |
| | | {Amide} |
| 864 | CyA-[hPhe5;Nle6;Pra17;Glu28]JzTx-V(1-29) | {H}-[CyA]YCQK[Nle]WT |
| | | CDSKRACC[Pra[GLRCKLW |
| | | CRKEI{Amide} |
| 865 | CyA-[Nle6;Pra17;Glu28;Cha29]JzTx-V(1-29) | {H}-[CyA]YCQKW[Nle]W |
| | | TCDSKRACC[Pra]GLRCKL |
| | | WCRKE[Cha]{Amide} |
| 866 | CyA-[Glu1,28;Nle6;Pra17;Cha29] | {H}-[CyA]ECQKW[Nle]W |
| | JzTx-V(1-29) | TCDSKRACC[Pra]GLRCKL |
| | | WCRKE[Cha]{Amide} |
| 867 | Glu-[hPhe5;Nle6;Pra17;Glu28;Cha29] | {H}-EYCQK[hPhe][Nle] |
| | JzTx-V(1-29) | WTCDSKRACC[Pra]GLRCK |
| | | LWCRKE[Cha]{Amide} |
| 868 | Glu-Nva-[Nle6;Pra17;Glu28;Cha29] | {H}-E[Nva]YCQKW[Nle] |
| | JzTx-V(1-29) | WTCDSKRACC[Pra]GLRCK |
| | | LWCRKE[Cha]{Amide} |
| 869 | CyA-[Glu1,11,28;Nle6;Pra17;Cha29] | {H}-[CyA]ECQKW[Nle]W |
| | JzTx-V(1-29) | TCDEKRACC[Pra]GLRCKL |
| | | WCRKE[Cha]{Amide} |
| 870 | CyA-[Nle6;Pra17;5-BrW24;Glu28] | {H}-[CyA]YCQKW[Nle]W |
| | JzTx-V(1-29) | TCDSKRACC[Pra]GLRCKL |
| | | [5-BrW]CRKEI{Amide} |
| 871 | Pra-[Nle6;5-BrW24]JzTx-V(1-29) | {H}-[Pra]YCQKW[Nle]W |
| | | TCDSKRACCEGLRCKL |
| | | [5-BrW]CRKII{Amide} |
| 872 | CyA-[Nle6;Pra17;5-BrW24]JzTx-V(1-29) | {H}-[CyA]YCQKW[Nle]W |
| | | TCDSKRACC[Pra]GLRCKL |
| | | [5-BrW]CRKII{Amide} |
| 873 | CyA-[Nle6;Pra17;6-BrW24;Glu28] | {H}-[CyA]YCQKW[Nle]W |
| | JzTx-V(1-29) | TCDSKRACC[Pra]GLRCKL |
| | | [6-BrW]CRKEI{Amide} |
| 874 | CyA-[Nle6;Pra17;6-MeW24;Glu28] | {H}-[CyA]YCQKW[Nle]W |
| | JzTx-V(1-29) | TCDSKRACC[Pra]GLRCKL |
| | | [6-MeW]CRKEI{Amide} |
| 875 | CyA-[Nle6;Pra17;7-BrW24;Glu28] | {H}-[CyA]YCQKW[Nle]W |
| | JzTx-V(1-29) | TCDSKRACC[Pra]GLRCKL |
| | | [7-BrW]CRKEI{Amide} |
| 876 | CyA-[Nle6;Pra17;Glu28;Phe29] | {H}-[CyA]YCQKW[Nle]W |
| | JzTx-V(1-29) | TCDSKRACC[Pra]GLRCKL |
| | | WCRKEF{Amide} |
| 877 | CyA-[Nle6;Pra17;Glu28;hPhe29] | {H}-[CyA]YCQKW[Nle]W |
| | JzTx-V(1-29) | TCDSKRACC[Pra]GLRCKL |
| | | WCRKE{Amide} |
| 878 | Pra-[hPhe5;Nle6;Glu28;Cha29] | {H}-[Pra]YCQK[Nle]WT |
| | JzTx-V(1-29) | CDSKRACCEGLRCKLWCRKE |
| | | [Cha]{Amide} |
| 879 | [Nle6;Pra12;Glu28]JzTx-V(1-29) | {H}-YCQKW[Nle]WTCDS |
| | | [Pra]RACCEGLRCKLWCRK |
| | | EI{Amide} |
| 880 | CyA-Nle6,Lys(Pra-NPEG3)14,Glu28] | {H}-[CyA]YCQKW[Nle]W |
| | JzTx-V(1-29) | TCDSKR[KPPG3]CCEGLRC |
| | | KLWCRKEI{Amide} |
| 881 | CyA-[Leu6,Lys(Pra-NPEG3)14,Glu28] | {H}-[CyA]YCQKWLWTCDS |
| | JzTx-V(1-29) | KR[KPPG3]CCEGLRCKLWC |
| | | RKEI{Amide} |
| 882 | Pra-[Nle6;Lys(AOA)12;Glu28]JzTx-V(1-29) | {H}-[Pra]YCQKW[Nle]W |
| | | TCDSK(AOA)RACCEGLRCK |
| | | LWCRKEI{Amide} |
| 883 | Atz(NPEG10)-[Nle6;Glu28]JzTx-V(1-29) | {H}-[Atz](NPeg9)YCQK |
| | | W[Nle]WTCDSKRACCEGLR |
| | | CKLWCRKEI{Amide} |
| 884 | Atz(PEG11-bromoacetamide)-[Nle6,Glu28] | {H}-[Atz](PEG11- |
| | JzTx-V(1-29) | bromoacetamide)YCQKW |
| | | [Nle]WTCDSKRACCEGLRC |
| | | KLWCRKEI{Amide} |
| 885 | Atz-[Nle6,Glu28]JzTx-V(1-29) | {H}-[Atz]YCQKW[Nle]W |
| | | TCDSKRACCEGLRCKLWCRK |
| | | EI{Amide} |
| 886 | Atz(NPEG23)-[Nle6]JzTx-V(1-29) | {H}-[N3PGAzNH]YCQKW |
| | | [Nle]WTCDSKRACCEGLRC |
| | | KLWCRKII{Amide} |
| 887 | Atz(PEG11-bromoacetamide)-[Nle6] | {H}-[Atz](PEG11- |
| | JzTx-V(1-29) | bromoacetamide)YCQKW |
| | | [Nle]WTCDSKRACCEGLRC |
| | | KLWCRKII{Amide} |
| 888 | CyA-Nle6,Atz(PEG11-bromoacetamide) | {H}-[CyA]YCQKW[Nle]W |
| | 17,Glu28]JzTx-V(1-29) | TCDSKRACC[Atz](PEG11- |
| | | bromoacetamide)GLRCK |
| | | LWCRKEI{Amide) |
| 889 | CyA-[Nle6,Atz17,Glu28]JzTx-V(1-29) | {H}-[CyA]YCQKW[Nle]W |
| | | TCDSKRACC[Atz]GLRCKL |
| | | WCRKEI {Amide) |
| 890 | CyA-[Nle6,Lys(Atz(PEG11-bromoacetamide)) | {H}-K[CyA]YCQKW[Nle] |
| | 14,Glu28]JzTx-V(1-29) | WTCDSKRK(Atz(PEG11- |
| | | bromoacetamide))CCEG |
| | | LRCKLWCRKEI{Amide} |
| 891 | CyA-[Nle6,Lys(Atz(NPEG10))14,Glu28] | {H}-K[CyA]YCQKW[Nle] |
| | JzTx-V(1-29) | WTCDSKRK(Atz(NPeg9)) |
| | | CCEGLRCKLWCRKEI |
| | | {Amide} |
| 892 | CyA-[Nle6,Lys(Atz)14,Glu28]JzTx-V(1-29) | {H}-K[CyA]YCQKW[Nle] |
| | | WTCDSKRK(Atz)CCEGLRC |
| | | KLWCRKEI{Amide} |
| 893 | Atz-[Nle6;5-BrW24;Glu28]JzTx-V(1-29) | {H}-[Atz]YCQKW[Nle]W |
| | | TCDSKRACCEGLRCKL |
| | | [5-BrW]CRKEI{Amide} |
| 894 | CyA-[Nle6;Atz17;5-BrW24;Glu28] | {H}-[CyA]YCQKW[Nle]W |
| | JzTx-V(1-29) | TCDSKRACC[Atz]GLRCKL |
| | | [5-BrW]CRKEI{Amide} |
| 895 | CyA-[Nle6,Atz(palmitate)17,Glu28] | {H}-[CyA]YCQKW[Nle]W |
| | JzTx-V(1-29) | TCDSKRACC[Atz] |
| | | (palmitate)GLRCKLWCR |
| | | KEI{Amide} |
| 896 | CyA-[Nle6,Atz(GGGGS-SA21-amide)17,Glu28] | {H}-[CyA]YCQKW[Nle]W |
| | JzTx-V(1-29) | TCDSKRACC[Atz] |
| | | (pentanoyl-GGGGSRLIE |
| | | DICLPRWGCLWEDD-Amide) |
| | | GLRCKLWCRKEI{Amide} |
| 897 | CyA-[Nle6,Atz(Histag)17,Glu28] | {H}-[CyA]YCQKW[Nle]W |
| | JzTx-V(1-29) | TCDSKRACC[Atz] |
| | | (pentanoyl-GGGGSGGGG |
| | | SSLQKASGALEHHHHHHHH- |
| | | FreeAcid)GLRCKLWCRKE |
| | | I{Amide} |
| 898 | Atz(Biotin)-[Nle6]JzTx-V(1-29) | {H}-[Atz] |
| | | (ClickBiotin)YCQKW |
| | | [Nle]WTCDSKRACCEGLRC |
| | | KLWCRKII{Amide} |
| 898 | Atz(Biotin)-[Nle6]JzTx-V(1-29) | {H}-[Atz] |
| | | (ClickBiotin)YCQKW |
| | | [Nle]WTCDSKRACCEGLRC |
| | | KLWCRKII{Amide} |
| 899 | Atz(palmitate)-[Nle6,Glu28]JzTx-V(1-29) | {H}-[Atz](palmitate) |
| | | YCQKW[Nle]WTCDSKRACC |
| | | EGLRCKLWCRKEI{Amide} |
| 900 | CyA-[Atz(palmitate)1,Nle6,Glu28] | {H}-[CyA][Atz] |
| | JzTx-V(1-29) | (palmitate)CQKW[Nle] |
| | | WTCDSKRACCEGLRCKLWCR |
| | | KEI{Amide} |
| 901 | CyA-[Nle6,Atz(palmitate)11,Glu28] | {H}-[CyA]YCQKW[Nle]W |
| | JzTx-V(1-29) | TCD[Atz](palmitate)K |
| | | RACCEGLRCKLWCRKEI |
| | | {Amide} |
| 902 | CyA-[Nle6,Atz(palmitate)12,Glu28] | {H}-[CyA]YCQKW[Nle]W |
| | JzTx-V(1-29) | TCDS[Atz](palmitate) |
| | | RACCEGLRCKLWCRKEI |
| | | {Amide} |
| 903 | CyA-[Nle6,Lys(Atz(palmitate))14,Glu28] | {H}-[CyA]YCQKW[Nle]W |
| | JzTx-V(1-29) | TCDSKRK([Atz] |
| | | (palmitate))CCEGLRCK |
| | | LWCRKEI{Amide} |
| 904 | Atz(GGGGS-SA21)-[Nle6,Glu28]JzTx-V(1-29) | {H}-[Atz](pentanoyl- |
| | | GGGGSRLIEDICLPRWGCLW |
| | | EDD-Amide)YCQKW[Nle] |
| | | WTCDSKRACCEGLRCKLWCR |
| | | KEI{Amide} |
| 905 | CyA-[Atz(GGGGS-SA21)1,Nle6,Glu28] | {H}-[CyA][Atz] |
| | JzTx-V(1-29) | (pentanoyl-GGGGSRLIE |
| | | DICLPRWGCLWEDD-Amide) |
| | | CQKW[Nle]WTCDSKRACCE |
| | | GLRCKLWCRKEI{Amide} |
| 906 | CyA-[Nle6,Atz(GGGGS-SA21)11,Glu28] | {H}-[CyA]YCQKW[Nle]W |
| | JzTx-V(1-29) | TCD[Atz](pentanoyl-G |
| | | GGGSRLIEDICLPRWGCLWE |
| | | DD-Amide)KRACCEGLRCK |
| | | LWCRKEI{Amide} |
| 907 | CyA-[Nle6,Atz(GGGGS-SA21)12,Glu28] | {H}-[CyA]YCQKW[Nle]W |
| | JzTx-V(1-29) | TCDS[Atz](pentanoyl- |
| | | GGGGSRLIEDICLPRWGCLW |
| | | EDD-Amide)RACCEGLRCK |
| | | LWCRKEI{Amide} |
| 908 | CyA-[Nle6,Lys(Atz(GGGGS-SA21))14,Glu28] | {H}-[CyA]YCQKW[Nle]W |
| | JzTx-V(1-29) | TCDSKRK([Atz] |
| | | (pentanoyl-GGGGSRLIE |
| | | DICLPRWGCLWEDD- |
| | | Amide))CCEGLRCKLWCRK |
| | | EI{Amide} |
| 909 | CyA-[Nle6;Pra17;Glu28]JzTx-V(1-29)- | {H}-[CyA]YCQKW[Nle]W |
| | Trp-FreeAcid | TCDSKRACC[Pra]GLRCKL |
| | | WCRKEIW{FreeAcid} |
| 910 | CyA-[Nle6;Pra17;Leu27,29;Asn28] | {H}-[CyA]YCQKW[Nle]W |
| | JzTx-V(1-29)-FreeAcid | TCDSKRACC[Pra]GLRCKL |
| | | WCRLNL{FreeAcid} |
| 911 | Pra-[Nle6;Glu28]JzTx-V(1-29)- | {H}-[Pra]YCQKW[Nle]W |
| | Trp-FreeAcid | TCDSKRACCEGLRCKLWCRK |
| | | EIW{FreeAcid} |
| 912 | Pra-[Nle6;Glu28]JzTx-V(1-29)- | {H}-[Pra]YCQKW[Nle]W |
| | Glu-Trp-FreeAcid | TCDSKRACCEGLRCKLWCRK |
| | | EIEW{FreeAcid} |
| 913 | Pra-[Nle6;Glu28]JzTx-V(1-29)- | {H}-[Pra]YCQKW[Nle]W |
| | Glu-Glu-Gly-FreeAcid | TCDSKRACCEGLRCKLWCRK |
| | | EIEEG{FreeAcid} |
| 914 | Pra-[Nle6;Lys28]JzTx-V(1-29)- | {H}-[Pra]YCQKW[Nle]W |
| | Glu-Trp-FreeAcid | TCDSKRACCEGLRCKLWCRK |
| | | KIEW{FreeAcid} |
| 915 | Pra-[Nle6;Lys28]JzTx-V(1-29)- | {H}-[Pra]YCQKW[Nle]W |
| | Glu-Glu-Gly-FreeAcid | TCDSKRACCEGLRCKLWCRK |
| | | KIEEG{FreeAcid} |
| 916 | Pra-[Nle6;Leu27,29;Asn28] | {H}-[Pra]YCQKW[Nle]W |
| | JzTx-V(1-29)-FreeAcid | TCDSKRACCEGLRCKLWCRL |
| | | NL{FreeAcid} |
| 917 | CyA-[Nle6;Pra17]JzTx-V(1-29)- | {H}-[CyA]YCQKW[Nle]W |
| | Trp-FreeAcid | TCDSKRACC[Pra]GLRCKL |
| | | WCRKIIW{FreeAcid} |
| 918 | CyA-[Nle6;Pra17]JzTx-V(1-29)- | {H}-[CyA]YCQKW[Nle]W |
| | Glu-Trp-FreeAcid | TCDSKRACC[Pra]GLRCKL |
| | | WCRKIIEW{FreeAcid} |
| 919 | CyA-[Nle6;Pra17]JzTx-V(1-29)- | {H}-[CyA]YCQKW[Nle]W |
| | Glu-Glu-Gly-FreeAcid | TCDSKRACC[Pra]GLRCKL |
| | | WCRKIIEEG{FreeAcid} |
| 920 | Pra-[Nle6]JzTx-V(1-29)-Trp-FreeAcid | {H}-[Pra]YCQKW[Nle]W |
| | | TCDSKRACCEGLRCKLWCRK |
| | | IIW{FreeAcid} |
| 921 | Pra-[Nle6]JzTx-V(1-29)- | {H}-[Pra]YCQKW[Nle]W |
| | Glu-Trp-FreeAcid | TCDSKRACCEGLRCKLWCRK |
| | | IIEW{FreeAcid} |
| 922 | Pra-[Nle6]JzTx-V(1-29)- | {H}-[Pra]YCQKW[Nle]W |
| | Glu-Glu-Gly-FreeAcid | TCDSKRACCEGLRCKLWCRK |
| | | IIEEG{FreeAcid} |
| 923 | CyA-[Nle6;Pra17;5-BrW24;Glu28] | {H}-[CyA]YCQKW[Nle]W |
| | JzTx-V(1-29)-Trp-FreeAcid | TCDSKRACC[Pra]GLRCKL |
| | | [5-BrW]CRKEIW |
| | | {FreeAcid} |
| 924 | CyA-[Nle6;Pra17;5-BrW24;Glu28] | {H}-[CyA]YCQKW[Nle]W |
| | JzTx-V(1-29)-Glu-Trp-FreeAcid | TCDSKRACC[Pra]GLRCKL |
| | | [5-BrW]CRKEIEW |
| | | {FreeAcid} |
| 925 | CyA-[Nle6;Pra17;5-BrW24;Glu28]JzTx-V | {H}-[CyA]YCQKW[Nle]W |
| | (1-29)-Glu-Glu-Gly-FreeAcid | TCDSKRACC[Pra]GLRCKL |
| | | [5-BrW]CRKEIEEG |
| | | {FreeAcid} |
| 926 | CyA-[Nle6;Pra17;5-BrW24;Lys28]JzTx-V | {H}-[CyA]YCQKW[Nle]W |
| | (1-29)-Glu-Trp-FreeAcid | TCDSKRACC[Pra]GLRCKL |
| | | [5-BrW]CRKKIEW |
| | | {FreeAcid} |
| 927 | CyA-[Nle6;Pra17;5-BrW24;Lys28]JzTx-V | {H}-[CyA]YCQKW[Nle]W |
| | (1-29)-Glu-Glu-Gly-FreeAcid | TCDSKRACC[Pra]GLRCKL |
| | | [5-BrW]CRKKIEEG |
| | | {FreeAcid} |
| 928 | CyA-[Nle6;Pra17;5-BrW24;Leu27,29;Asn28] | {H}-[CyA]YCQKW[Nle]W |
| | JzTx-V(1-29)-FreeAcid | TCDSKRACC[Pra]GLRCKL |
| | | [5-BrW]CRLNL |
| | | {FreeAcid} |
| 929 | Pra-[Nle6;5-BrW24;Glu28] | {H}-[Pra]YCQKW[Nle]W |
| | JzTx-V(1-29)-Trp-FreeAcid | TCDSKRACCEGLRCKL |
| | | [5-BrW]CRKEIW |
| | | {FreeAcid} |
| 930 | Pra-[Nle6;5-BrW24;Glu28]JzTx-V | {H}-[Pra]YCQKW[Nle]W |
| | (1-29)-Glu-Trp-FreeAcid | TCDSKRACCEGLRCKL |
| | | [5-BrW]CRKEIEW |
| | | {FreeAcid} |
| 931 | Pra-[Nle6;5-BrW24;Glu28]JzTx-V(1-29)- | {H}-[Pra]YCQKW[Nle]W |
| | Glu-Glu-Gly-FreeAcid | TCDSKRACCEGLRCKL |
| | | [5-BrW]CRKEIEEG |
| | | {FreeAcid} |
| 932 | Pra-[Nle6;5-BrW24;Lys28]JzTx-V(1-29)- | {H}-[Pra]YCQKW[Nle]W |
| | Glu-Trp-FreeAcid | TCDSKRACCEGLRCKL |
| | | [5-BrW]CRKKIEW |
| | | {FreeAcid} |
| 933 | Pra-[Nle6;5-BrW24;Lys28]JzTx-V(1-29)- | {H}-[Pra]YCQKW[Nle]W |
| | Glu-Glu-Gly-FreeAcid | TCDSKRACCEGLRCKL |
| | | [5-BrW]CRKKIEEG |
| | | {FreeAcid} |
| 934 | Pra-[Nle6;5-BrW24;Leu27,29;Asn28] | {H}-[Pra]YCQKW[Nle]W |
| | JzTx-V(1-29)-FreeAcid | TCDSKRACCEGLRCKL |
| | | [5-BrW]CRLNL |
| | | {FreeAcid} |
| 935 | CyA-[Nle6;Pra17;5-BrW24]JzTx-V(1-29)- | {H}-[CyA]YCQKW[Nle]W |
| | Trp-FreeAcid | TCDSKRACC[Pra]GLRCKL |
| | | [5-BrW]CRKIIW |
| | | {FreeAcid} |
| 936 | CyA-[Nle6;Pra17;5-BrW24]JzTx-V(1-29)- | {H}-[CyA]YCQKW[Nle]W |
| | Glu-Trp-FreeAcid | TCDSKRACC[Pra]GLRCKL |
| | | [5-BrW]CRKIIEW |
| | | {FreeAcid} |
| 937 | CyA-[Nle6;Pra17;5-BrW24]JzTx-V(1-29)- | {H}-[CyA]YCQKW[Nle]W |
| | Glu-Glu-Gly-FreeAcid | TCDSKRACC[Pra]GLRCKL |
| | | [5-BrW]CRKIIEEG |
| | | {FreeAcid} |
| 938 | Pra-[Nle6;5-BrW24]JzTx-V(1-29)- | {H}-[Pra]YCQKW[Nle]W |
| | Trp-FreeAcid | TCDSKRACCEGLRCKL |
| | | [5-BrW]CRKIIW |
| | | {FreeAcid} |
| 939 | Pra-[Nle6;5-BrW24]JzTx-V(1-29)- | {H}-{Pra]YCQKW[Nle]W |
| | Glu-Trp-FreeAcid | TCDSKRACCEGLRCKL |
| | | [5-BrW]CRKIIEW |
| | | {FreeAcid} |
| 940 | Pra-[Nle6;5-BrW24]JzTx-V(1-29)- | {H}-[Pra]YCQKW[Nle]W |
| | Glu-Glu-Gly-FreeAcid | TCDSKRACCEGLRCKL |
| | | [5-BrW]CRKIIEEG |
| | | {FreeAcid} |
| 941 | CyA-[Glu1,28;Nle6;Ala12;Pra17] | {H}-[CyA]ECQKW[Nle]W |
| | JzTx-V(1-29) | TCDSARACC[Pra]GLRCKL |
| | | WCRKEI{Amide} |
| 942 | CyA-[Glu1,28;Nle6;Pra17;Asp18] | {H}-[CyA]ECQKW[Nle]W |
| | JzTx-V(1-29) | TCDSKRACC[Pra]DLRCKL |
| | | WCRKEI{Amide} |
| 943 | CyA-[Glu1,28;Nle6;Pra17;Val20] | {H}-[CyA]ECQKW[Nle]W |
| | JzTx-V(1-29) | TCDSKRACC[Pra]GLVCKL |
| | | WCRKEI{Amide} |
| 944 | CyA-[Glu1,28;Nle6;Pra17;Gln22] | {H}-[CyA]ECQKW[Nle]W |
| | JzTx-V(1-29) | TCDSKRACC[Pra]GLRCQL |
| | | WCRKEI{Amide} |
| 945 | CyA-[Glu1,28;Nle6;Pra17;Tyr27] | {H}-[CyA]ECQKW[Nle]W |
| | JzTx-V(1-29) | TCDSKRACC[Pra]GLRCKL |
| | | WCRYEI{Amide} |
| 946 | CyA-[Glu1,28;Nle6;Pra17;Leu27] | {H}-[CyA]ECQKW[Nle]W |
| | JzTx-V(1-29) | TCDSKRACC[Pra]GLRCKL |
| | | WCRLEI{Amide} |
| 947 | CyA-[Nle6;Glu11,28;Ala12;Pra17] | {H}-[CyA]YCQKW[Nle]W |
| | JzTx-V(1-29) | TCDEARACC[Pra]GLRCKL |
| | | WCRKEI{Amide} |
| 948 | CyA-[Nle6;Glu11,28;Pra17;Asp18] | {H}-[CyA]YCQKW[Nle]W |
| | JzTx-V(1-29) | TCDEKRACC[Pra]DLRCKL |
| | | WCRKEI{Amide} |
| 949 | CyA-[Nle6;Glu11,28;Pra17;Val20] | {H}-[CyA]YCQKW[Nle]W |
| | JzTx-V(1-29) | TCDEKRACC[Pra]GLVCKL |
| | | WCRKEI{Amide} |
| 950 | CyA-[Nle6;Glu11,28;Pra17;Gln22] | {H}-[CyA]YCQKW[Nle]W |
| | JzTx-V(1-29) | TCDEKRACC[Pra]GLRCQL |
| | | WCRKEI{Amide} |
| 951 | CyA-[Nle6;Glu11,28;Pra17;Tyr27] | {H}-[CyA]YCQKW[Nle]W |
| | JzTx-V(1-29) | TCDEKRACC[Pra]GLRCKL |
| | | WCRYEI{Amide} |
| 952 | CyA-[Nle6;Glu11,28;Pra17;Leu27] | {H}-[CyA]YCQKW[Nle]W |
| | JzTx-V(1-29) | TCDEKRACC[Pra]GLRCKL |
| | | WCRLEI{Amide} |
| 953 | CyA-[Nle6;Glu12,28;Pra17;Asp18] | {H}-[CyA]YCQKW[Nle]W |
| | JzTx-V(1-29) | TCDSERACC[Pra]DLRCKL |
| | | WCRKEI{Amide} |
| 954 | CyA-[Nle6;Glu12,28;Pra17;Val20] | {H}-[CyA]YCQKW[Nle]W |
| | JzTx-V(1-29) | TCDSERACC[Pra]GLVCKL |
| | | WCRKEI{Amide} |
| 955 | CyA-[Nle6;Glu12,28;Pra17;Gln22] | {H}-[CyA]YCQKW[Nle]W |
| | JzTx-V(1-29) | TCDSERACC[Pra]GLRCQL |
| | | WCRKEI{Amide} |
| 956 | CyA-[Nle6;Glu12,28;Pra17;Tyr27] | {H}-[CyA]YCQKW[Nle]W |
| | PzTx-V(1-29) | TCDSERACC[Pra]GLRCKL |
| | | WCRYEI{Amide} |
| 957 | CyA-[Nle6;Glu12,28;Pra17;Leu27] | {H}-[CyA]YCQKW[Nle]W |
| | JzTx-V(1-29) | TCDSERACC[Pra]GLRCKL |
| | | WCRLEI{Amide} |
| 958 | CyA-[Nle6;Ala12;Glu14,28;Pra17] | {H}-[CyA]YCQKW[Nle]W |
| | JzTx-V(1-29) | TCDSARECC[Pra]GLRCKL |
| | | WCRKEI{Amide} |
| 959 | CyA-[Nle6;Glu14,28;Pra17;Asp18] | {H}-[CyA]YCQKW[Nle]W |
| | JzTx-V(1-29) | TCDSKRECC[Pra]DLRCKL |
| | | WCRKEI{Amide} |
| 960 | CyA-+N1e6;Glu14,28;Pral 7;Va120] | {H}-[CyA]YCQKW[Nle]W |
| | JzTx-V(1-29) | TCDSKRECC[Pra]GLVCKL |
| | | WCRKEI{Amide} |
| 961 | CyA-[Nle6;Glu14,28;Pra17;Gln22] | {H}-[CyA]YCQKW[Nle]W |
| | JzTx-V(1-29) | TCDSKRECC[Pra]GLRCQL |
| | | WCRKEI{Amide} |
| 962 | CyA-[Nle6;Glu14,28;Pra17;Tyr27] | {H}-[CyA]YCQKW[Nle]W |
| | JzTx-V(1-29) | TCDSKRECC[Pra]GLRCKL |
| | | WCRYEI{Amide} |
| 963 | CyA-[Nle6;Glu14,28;Pra17;Leu27] | {H}-[CyA]YCQKW[Nle]W |
| | JzTx-V(1-29) | TCDSKRECC[Pra]GLRCKL |
| | | WCRLEI{Amide} |
| 964 | CyA-[Nle6;Ala12;Pra17;Val20;Glu28] | {H}-[CyA]YCQKW[Nle]W |
| | JzTx-V(1-29) | TCDSARACC[Pra]GLVCKL |
| | | WCRKEI{Amide} |
| 965 | CyA-[Nle6;Pra17;Asp18;Val20;Glu28] | {H}-[CyA]YCQKW[Nle]W |
| | JzTx-V(1-29) | TCDSKRACC[Pra]DLVCKL |
| | | WCRKEI{Amide} |
| 966 | CyA-[Nle6;Pra17;Val20;Gln22;Glu28] | {H}-[CyA]YCQKW[Nle]W |
| | JzTx-V(1-29) | TCDSKRACC[Pra]GLVCQL |
| | | WCRKEI{Amide} |
| 967 | CyA-[Nle6;Pra17;Val20;Tyr27;Glu28] | {H}-[CyA]YCQKW[Nle]W |
| | JzTx-V(1-29) | TCDSKRACC[Pra]GLVCKL |
| | | WCRYEI{Amide} |
| 968 | CyA-[Nle6;Pra17;Val20;Leu27;Glu28] | {H}-[CyA]YCQKW[Nle]W |
| | JzTx-V(1-29) | TCDSKRACC[Pra]GLVCKL |
| | | WCRLEI{Amide} |
| 969 | CyA-[Nle6;Glu11,12,28;Pra17] | {H}-[CyA]YCQKW[Nle]W |
| | JzTx-V(1-29) | TCDEERACC[Pra]GLRCKL |
| | | WCRKEI{Amide} |
| 970 | CyA-[Nle6;Glu11,12,28;Pra17;Asp18] | {H}-[CyA]YCQKW[Nle]W |
| | JzTx-V(1-29) | TCDEERACC[Pra]DLRCKL |
| | | WCRKEI{Amide} |
| 971 | CyA-[Nle6;Glu11,12,28;Pra17;Val20] | {H}-[CyA]YCQKW[Nle]W |
| | JzTx-V(1-29) | TCDEERACC[Pra]GLVCKL |
| | | WCRKEI{Amide} |
| 972 | CyA-]Nle6;Glu11,12,28;Pra17;Gln22] | {H}-[CyA]YCQKW[Nle]W |
| | JzTx-V(1-29) | TCDEERACC[Pra]GLRCQL |
| | | WCRKEI{Amide} |
| 973 | CyA-[Nle6;Glu11,12,28;Pra17;Tyr27] | {H}-[CyA]YCQKW[Nle]W |
| | JzTx-V(1-29) | TCDEERACC[Pra]GLRCKL |
| | | WCRYEI{Amide} |
| 974 | CyA-[Nle6;Glu11,12,28;Pra17;Leu27] | {H}-[CyA]YCQKW[Nle]W |
| | JzTx-V(1-29) | TCDEERACC[Pra]GLRCKL |
| | | WCRLEI{Amide} |
| 975 | CyA-[Nle6;Glu11,12,28;Pra17;Val20;Gln22] | {H}-[CyA]YCQKW[Nle]W |
| | JzTx-V(1-29) | TCDEERACC[Pra]GLVCQL |
| | | WCRKEI{Amide} |
| 976 | CyA-[Nle6;Glu11,12,28;Pra17;Val20;Tyr27] | {H}-[CyA]YCQKW[Nle]W |
| | JzTx-V(1-29) | TCDEERACC[Pra]GLVCKL |
| | | WCRYEI{Amide} |
| 977 | CyA-[Nle6;Glu11,12,28;Pra17;Val20;Leu27] | {H}-[CyA]YCQKW[Nle]W |
| | JzTx-V(1-29) | TCDEERACC[Pra]GLVCKL |
| | | WCRLEI{Amide} |
| 978 | CyA-[Nle6;Glu12,18,28;Pra17;Val20] | {H}-[CyA]YCQKW[Nle]W |
| | JzTx-V(1-29) | TCDSERACC[Pra]ELVCKL |
| | | WCRKEI{Amide} |
| 979 | CyA-[Nle6;Glu12,18,28;Pra17;Gln22] | {H}-[CyA]YCQKW[Nle]W |
| | JzTx-V(1-29) | TCDSERACC[Pra]ELRCQL |
| | | WCRKEI{Amide} |
| 980 | CyA-[Nle6;Glu12,18,28;Pra17;Tyr27] | {H}-[CyA]YCQKW[Nle]W |
| | JzTx-V(1-29) | TCDSERACC[Pra]ELRCKL |
| | | WCRYEI{Amide} |
| 981 | CyA-[Nle6;Glu12,18,28;Pra17;Leu27] | {H}-[CyA]YCQKW[Nle]W |
| | JzTx-V(1-29) | TCDSERACC[Pra]ELRCKL |
| | | WCRLEI{Amide} |
| 982 | CyA-[Nle6;Glu12,18,28;Pra17;Val20;Gln22] | {H}-[CyA]YCQKW[Nle]W |
| | JzTx-V(1-29) | TCDSERACC[Pra]ELVCQL |
| | | WCRKEI{Amide} |
| 983 | CyA-[Nle6;Glu12,18,28;Pra17;Val20;Tyr27] | {H}-[CyA]YCQKW[Nle]W |
| | JzTx-V(1-29) | TCDSERACC[Pra]ELVCKL |
| | | WCRYEI{Amide} |
| 984 | CyA-[Nle6;Glu12,18,28;Pra17;Val20;Leu27] | {H}-[CyA]YCQKW[Nle]W |
| | JzTx-V(1-29) | TCDSERACC[Pra]ELVCKL |
| | | WCRLEI{Amide} |
| 985 | CyA-[Nle6;Pra17;Tyr27;Asn28;Leu29] | {H}-[CyA]YCQKW[Nle]W |
| | JzTx-V(1-29) | TCDSKRACC[Pra]GLRCKL |
| | | WCRYNL{Amide} |
| 986 | Pra-[Nle6;Ala12;Glu28]JzTx-V(1-29) | {H}-[Pra]YCQKW[Nle]W |
| | | TCDSARACCEGLRCKLWCRK |
| | | EI{Amide} |
| 987 | Pra-[Nle6;Asp18;Glu28]JzTx-V(1-29) | {H}-[Pra]YCQKW[Nle]W |
| | | TCDSKRACCEDLRCKLWCRK |
| | | EI{Amide} |
| 988 | Pra-[Nle6;Tyr27;Glu28]JzTx-V(1-29) | {H}-[Pra]YCQKW[Nle]W |
| | | TCDSKRACCEGLRCKLWCRY |
| | | EI{Amide} |
| 989 | Pra-[Nle6;Leu27;Glu28]JzTx-V(1-29) | {H}-[Pra]YCQKW[Nle]W |
| | | TCDSKRACCEGLRCKLWCRL |
| | | EI{Amide} |
| 990 | Pra-[Glu1,28;Nle6;Ala12]JzTx-V(1-29) | {H}-[Pra]ECQKW[Nle]W |
| | | TCDSARACCEGLRCKLWCRK |
| | | EI{Amide} |
| 991 | Pra-[Glu1,28;Nle6;Asp18]JzTx-V(1-29) | {H}-[Pra]ECQKW[Nle]W |
| | | TCDSKRACCEDLRCKLWCRK |
| | | EI{Amide} |
| 992 | Pra-[Glu1,28;Nle6;Val20]JzTx-V(1-29) | {H}-[Pra]ECQKW[Nle]W |
| | | TCDSKRACCEGLVCKLWCRK |
| | | EI{Amide} |
| 993 | Pra-[Glu1,28;Nle6;Gln22]JzTx-V(1-29) | {H}-[Pra]ECQKW[Nle]W |
| | | TCDSKRACCEGLRCQLWCRK |
| | | EI{Amide} |
| 994 | Pra-[Glu1,28;Nle6;Tyr27]JzTx-V(1-29) | {H}-[Pra]ECQKW[Nle]W |
| | | TCDSKRACCEGLRCKLWCRY |
| | | EI{Amide} |
| 995 | Pra-[Glu1,28;Nle6;Leu27]JzTx-V(1-29) | {H}-[Pra]ECQKW[Nle]W |
| | | TCDSKRACCEGLRCKLWCRL |
| | | EI{Amide} |
| 996 | Pra-[Nle6;Glu11,28;Ala12]JzTx-V(1-29) | {H}-[Pra]YCQKW[Nle]W |
| | | TCDEARACCEGLRCKLWCRK |
| | | EI{Amide} |
| 997 | Pra-[Nle6;Glu11,28;Asp18]JzTx-V(1-29) | {H}-[Pra]YCQKW[Nle]W |
| | | TCDEKRACCEDLRCKLWCRK |
| | | EI{Amide} |
| 998 | Pra-[Nle6;Glu11,28;Val20]JzTx-V(1-29) | {H}-[Pra]YCQKW[Nle]W |
| | | TCDEKRACCEGLVCKLWCRK |
| | | EI{Amide} |
| 999 | Pra-[Nle6;Glu11,28;Gln22]JzTx-V(1-29) | {H}-[Pra]YCQKW[Nle]W |
| | | TCDEKRACCEGLRCQLWCRK |
| | | EI{Amide} |
| 1000 | Pra-[Nle6;Glu11,28;Tyr27]JzTx-V(1-29) | {H}-[Pra]YCQKW[Nle]W |
| | | TCDEKRACCEGLRCKLWCRY |
| | | EI{Amide} |
| 1001 | Pra-[Nle6;Glu11,28;Leu27]JzTx-V(1-29) | {H}-[Pra]YCQKW[Nle]W |
| | | TCDEKRACCEGLRCKLWCRL |
| | | EI{Amide} |
| 1002 | Pra-[Nle6;Glu12,28;Asp18]JzTx-V(1-29) | {H}-[Pra]YCQKW[Nle]W |
| | | TCDSERACCEDLRCKLWCRK |
| | | EI{Amide} |
| 1003 | Pra-[Nle6;Glu12,28;Val20]JzTx-V(1-29) | {H}-[Pra]YCQKW[Nle]W |
| | | TCDSERACCEGLVCKLWCRK |
| | | EI{Amide} |
| 1004 | Pra-[Nle6;Glu12,28;Gln22]JzTx-V(1-29) | {H}-[Pra]YCQKW[Nle]W |
| | | TCDSERACCEGLRCQLWCRK |
| | | EI{Amide} |
| 1005 | Pra-[Nle6;Glu12,28;Tyr27]JzTx-V(1-29) | {H}-[Pra]YCQKW[Nle]W |
| | | TCDSERACCEGLRCKLWCRY |
| | | EI{Amide} |
| 1006 | Pra-[Nle6;Glu12,28;Leu27]JzTx-V(1-29) | {H}-[Pra]YCQKW[Nle]W |
| | | TCDSERACCEGLRCKLWCRL |
| | | EI{Amide} |
| 1007 | Pra-[Nle6;Ala12;Glu13,28]JzTx-V(1-29) | {H}-[Pra]YCQKW[Nle]W |
| | | TCDSAEACCEGLRCKLWCRK |
| | | EI{Amide} |
| 1008 | Pra-[Nle6;Glu13,28;Asp18]JzTx-V(1-29) | {H}-[Pra]YCQKW[Nle]W |
| | | TCDSKEACCEDLRCKLWCRK |
| | | EI{Amide} |
| 1009 | Pra-[Nle6;Glu13,28;Val20]JzTx-V(1-29) | {H}-[Pra]YCQKW[Nle]W |
| | | TCDSKEACCEGLVCKLWCRK |
| | | EI{Amide} |
| 1010 | Pra-[Nle6;Glu13,28;Gln22]JzTx-V(1-29) | {H}-[Pra]YCQKW[Nle]W |
| | | TCDSKEACCEGLRCQLWCRK |
| | | EI{Amide} |
| 1011 | Pra-[Nle6;Glu13,28;Tyr27]JzTx-V(1-29) | {H}-[Pra]YCQKW[Nle]W |
| | | TCDSKEACCEGLRCKLWCRY |
| | | EI{Amide} |
| 1012 | Pra-[Nle6;Glu13,28;Leu27]JzTx-V(1-29) | {H}-[Pra]YCQKW[Nle]W |
| | | TCDSKEACCEGLRCKLWCRL |
| | | EI{Amide} |
| 1013 | Pra-[Nle6;Ala12;Val20;Glu28] | {H}-[Pra]YCQKW[Nle]W |
| | JzTx-V(1-29) | TCDSARACCEGLVCKLWCRK |
| | | EI{Amide} |
| 1014 | Pra-[Nle6;Asp18;Val20;Glu28] | {H}-[Pra]YCQKW[Nle]W |
| | JzTx-V(1-29) | TCDSKRACCEDLVCKLWCRK |
| | | EI{Amide} |
| 1015 | Pra-[Nle6;Val20;Gln22;Glu28] | {H}-[Pra]YCQKW[Nle]W |
| | JzTx-V(1-29) | TCDSKRACCEGLVCQLWCRK |
| | | EI{Amide} |
| 1016 | Pra-[Nle6;Val20;Tyr27;Glu28] | {H}-[Pra]YCQKW[Nle]W |
| | JzTx-V(1-29) | TCDSKRACCEGLVCKLWCRY |
| | | EI{Amide} |
| 1017 | Pra-[Nle6;Val20;Leu27;Glu28] | {H}-[Pra]YCQKW[Nle]W |
| | JzTx-V(1-29) | TCDSKRACCEGLVCKLWCRL |
| | | EI{Amide} |
| 1018 | Pra-[Nle6;Glu11,12,28;Asp18] | {H}-[Pra]YCQKW[Nle]W |
| | JzTx-V(1-29) | TCDEERACCEDLRCKLWCRK |
| | | EI{Amide} |
| 1019 | Pra-[Nle6;Glu11,12,28;Val20] | {H}-[Pra]YCQKW[Nle]W |
| | JzTx-V(1-29) | TCDEERACCEGLVCKLWCRK |
| | | EI{Amide} |
| 1020 | Pra-[Nle6;Glu11,12,28;Gln22] | {H}-[Pra]YCQKW[Nle]W |
| | JzTx-V(1-29) | TCDEERACCEGLRCQLWCRK |
| | | EI{Amide} |
| 1021 | Pra-[Nle6;Glu11,12,28;Tyr27] | {H}-[Pra]YCQKW[Nle]W |
| | JzTx-V(1-29) | TCDEERACCEGLRCKLWCRY |
| | | EI{Amide} |
| 1022 | Pra-[Nle6;Glu11,12,28;Leu27] | {H}-[Pra]YCQKW[Nle]W |
| | JzTx-V(1-29) | TCDEERACCEGLRCKLWCRL |
| | | EI{Amide} |
| 1023 | Pra-[Nle6;Glu11,12,28;Val20;Gln22] | {H}-[Pra]YCQKW[Nle]W |
| | JzTx-V(1-29) | TCDEERACCEGLVCQLWCRK |
| | | EI{Amide} |
| 1024 | Pra-[Nle6;Glu11,12,28;Val20;Tyr27] | {H}-[Pra]YCQKW[Nle]W |
| | JzTx-V(1-29) | TCDEERACCEGLVCKLWCRY |
| | | EI{Amide} |
| 1025 | Pra-[Nle6;Glu11,12,28;Val20;Leu27] | {H}-[Pra]YCQKW[Nle]W |
| | JzTx-V(1-29) | TCDEERACCEGLVCKLWCRL |
| | | EI{Amide} |
| 1026 | Pra-[Nle6;Glu12,18,28;Val20] | {H}-[Pra]YCQKW[Nle]W |
| | JzTx-V(1-29) | TCDSERACCEELVCKLWCRK |
| | | EI{Amide} |
| 1027 | Pra-[Nle6;Glu12,18,28;Gln22] | {H}-[Pra]YCQKW[Nle]W |
| | JzTx-V(1-29) | TCDSERACCEELRCQLWCRK |
| | | EI{Amide} |
| 1028 | Pra-[Nle6;Glu12,18,28;Tyr27] | {H}-[Pra]YCQKW[Nle]W |
| | JzTx-V(1-29) | TCDSERACCEELRCKLWCRY |
| | | EI{Amide} |
| 1029 | Pra-[Nle6;Glu12,18,28;Leu27] | {H}-[Pra]YCQKW[Nle]W |
| | JzTx-V(1-29) | TCDSERACCEELRCKLWCRL |
| | | EI{Amide} |
| 1030 | Pra-[Nle6;Glu12,18,28;Val20;Gln22] | {H}-[Pra]YCQKW[Nle]W |
| | JzTx-V(1-29) | TCDSERACCEELVCQLWCRK |
| | | EI{Amide} |
| 1031 | Pra-[Nle6;Glu12,18,28;Val20;Tyr27] | {H}-[Pra]YCQKW[Nle]W |
| | JzTx-V(1-29) | TCDSERACCEELVCKLWCRY |
| | | EI{Amide} |
| 1032 | Pra-[Nle6;Glu12,18,28;Val20;Leu27] | {H}-[Pra]YCQKW[Nle]W |
| | JzTx-V(1-29) | TCDSERACCEELVCKLWCRL |
| | | EI{Amide} |
| 1033 | Pra-[Nle6;Tyr27;Asn28;Leu29] | {H}-[Pra]YCQKW[Nle]W |
| | JzTx-V(1-29) | TCDSKRACCEGLRCKLWCRY |
| | | NL{Amide} |
| 1034 | CyA-[Nle6;Glu11;Pra17]JzTx-V(1-29) | {H}-[CyA]YCQKW[Nle]W |
| | | TCDEKRACC[Pra]GLRCKL |
| | | WCRKII{Amide} |
| 1035 | CyA-[Nle6;Ala12;Pra17]JzTx-V(1-29) | {H}-[CyA]YCQKW[Nle]W |
| | | TCDSARACC[Pra]GLRCKL |
| | | WCRKII{Amide} |
| 1036 | CyA-[Nle6;Pra17;Asp18]JzTx-V(1-29) | {H}-[CyA]YCQKW[Nle]W |
| | | TCDSKRACC[Pra]DLRCKL |
| | | WCRKII{Amide} |
| 1037 | CyA-[Nle6;Pra17;Val20]JzTx-V(1-29) | {H}-[CyA]YCQKW[Nle]W |
| | | TCDSKRACC[Pra]GLVCKL |
| | | WCRKII{Amide} |
| 1038 | CyA-[Nle6;Pra17;Gln22]JzTx-V(1-29) | {H}-[CyA]YCQKW[Nle]W |
| | | TCDSKRACC[Pra]GLRCQL |
| | | WCRKII{Amide} |
| 1039 | CyA-[Nle6;Pra17;Tyr27]JzTx-V(1-29) | {H}-[CyA]YCQKW[Nle]W |
| | | TCDSKRACC[Pra]GLRCKL |
| | | WCRYII{Amide} |
| 1040 | CyA-[Nle6;Pra17;Leu27]JzTx-V(1-29) | {H}-[CyA]YCQKW[Nle]W |
| | | TCDSKRACC[Pra]GLRCKL |
| | | WCRLII{Amide} |
| 1041 | CyA-[Glu1;Nle6;Ala12;Pra17] | {H}-[CyA]ECQKW[Nle]W |
| | JzTx-V(1-29) | TCDSARACC[Pra]GLRCKL |
| | | WCRKII{Amide} |
| 1042 | CyA-[Glu1;Nle6;Pra17;Asp18] | {H}-[CyA]ECQKW[Nle]W |
| | JzTx-V(1-29) | TCDSKRACC[Pra]DLRCKL |
| | | WCRKII{Amide} |
| 1043 | CyA-[Glu1;Nle6;Pra17;Val20] | {H}-[CyA]ECQKW[Nle]W |
| | JzTx-V(1-29) | TCDSKRACC[Pra]GLVCKL |
| | | WCRKII{Amide} |
| 1044 | CyA-[Glu1;Nle6;Pra17;Gln22] | {H}-[CyA]ECQKW[Nle]W |
| | JzTx-V(1-29) | TCDSKRACC[Pra]GLRCQL |
| | | WCRKII{Amide} |
| 1045 | CyA-[Glu1;Nle6;Pra17;Tyr27] | {H}-[CyA]ECQKW[Nle]W |
| | JzTx-V(1-29) | TCDSKRACC[Pra]GLRCKL |
| | | WCRYII{Amide} |
| 1046 | CyA-[Glu1;Nle6;Pra17;Leu27] | {H}-[CyA]ECQKW[Nle]W |
| | JzTx-V(1-29) | TCDSKRACC[Pra]GLRCKL |
| | | WCRLII{Amide} |
| 1047 | CyA-[Nle6;Glu11;Ala12;Pra17] | {H}-[CyA]YCQKW[Nle]W |
| | JzTx-V(1-29) | TCDEARACC[Pra]GLRCKL |
| | | WCRKII{Amide} |
| 1048 | CyA-[Nle6;Glu11;Pra17;Asp18] | {H}-[CyA]YCQKW[Nle]W |
| | JzTx-V(1-29) | TCDEKRACC[Pra]DLRCKL |
| | | WCRKII{Amide} |
| 1049 | CyA-[Nle6;Glu11;Pra17;Val20] | {H}-[CyA]YCQKW[Nle]W |
| | JzTx-V(1-29) | TCDEKRACC[Pra]GLVCKL |
| | | WCRKII{Amide} |
| 1050 | CyA-[Nle6;Glu11;Pra17;Gln22] | {H}-[CyA]YCQKW[Nle]W |
| | JzTx-V(1-29) | TCDEKRACC[Pra]GLRCQL |
| | | WCRKII{Amide} |
| 1051 | CyA-[Nle6;Glu11;Pra17;Tyr27] | {H}-[CyA]YCQKW[Nle]W |
| | JzTx-V(1-29) | TCDEKRACC[Pra]GLRCKL |
| | | WCRYII{Amide} |
| 1052 | CyA-[Nle6;Glu11;Pra17;Leu27] | {H}-[CyA]YCQKW[Nle]W |
| | JzTx-V(1-29) | TCDEKRACC[Pra]GLRCKL |
| | | WCRLII{Amide} |
| 1053 | CyA-[Nle6;Glu12;Pra17;Asp18] | {H}-[CyA]YCQKW[Nle]W |
| | JzTx-V(1-29) | TCDSERACC[Pra]DLRCKL |
| | | WCRKII{Amide} |
| 1054 | CyA-[Nle6;Glu12;Pra17;Val20] | {H}-[CyA]YCQKW[Nle]W |
| | JzTx-V(1-29) | TCDSERACC[Pra]GLVCKL |
| | | WCRKII{Amide} |
| 1055 | CyA-[Nle6;Glu12;Pra17;Gln22] | {H}-[CyA]YCQKW[Nle]W |
| | JzTx-V(1-29) | TCDSERACC[Pra]GLRCQL |
| | | WCRKII{Amide} |
| 1056 | CyA-[Nle6;Glu12;Pra17;Tyr27] | {H}-[CyA]YCQKW[Nle]W |
| | JzTx-V(1-29) | TCDSERACC[Pra]GLRCKL |
| | | WCRYII{Amide} |
| 1057 | CyA-[Nle6;Glu12;Pra17;Leu27] | {H}-[CyA]YCQKW[Nle]W |
| | JzTx-V(1-29) | TCDSERACC[Pra]GLRCKL |
| | | WCRLII{Amide} |
| 1058 | CyA-[Nle6;Ala12;Glu14;Pra17] | {H}-[CyA]YCQKW[Nle]W |
| | JzTx-V(1-29) | TCDSARECC[Pra]GLRCKL |
| | | WCRKII{Amide} |
| 1059 | CyA-[Nle6;Glu14;Pra17;Asp18] | {H}-[CyA]YCQKW[Nle]W |
| | JzTx-V(1-29) | TCDSKRECC[Pra]DLRCKL |
| | | WCRKII{Amide} |
| 1060 | CyA-[Nle6;Glu14;Pra17;Val20] | {H}-[CyA]YCQKW[Nle]W |
| | JzTx-V(1-29) | TCDSKRECC[Pra]GLVCKL |
| | | WCRKII{Amide} |
| 1061 | CyA-[Nle6;Glu14;Pra17;Gln22] | {H}-[CyA]YCQKW[Nle]W |
| | JzTx-V(1-29) | TCDSKRECC[Pra]GLRCQL |
| | | WCRKII{Amide} |
| 1062 | CyA-[Nle6;Glu14;Pra17;Tyr27] | {H}-[CyA]YCQKW[Nle]W |
| | JzTx-V(1-29) | TCDSKRECC[Pra]GLRCKL |
| | | WCRYII{Amide} |
| 1063 | CyA-[Nle6;Glu14;Pra17;Leu27] | {H}-[CyA]YCQKW[Nle]W |
| | JzTx-V(1-29) | TCDSKRECC[Pra]GLRCKL |
| | | WCRLII{Amide} |
| 1064 | CyA-[Nle6;Ala12;Pra17;Val20] | {H}-[CyA]YCQKW[Nle]W |
| | JzTx-V(1-29) | TCDSARACC[Pra]GLVCKL |
| | | WCRKII{Amide} |
| 1065 | CyA-[Nle6;Pra17;Asp18;Val20] | {H}-[CyA]YCQKW[Nle]W |
| | JzTx-V(1-29) | TCDSKRACC[Pra]DLVCKL |
| | | WCRKII{Amide} |
| 1066 | CyA-[Nle6;Pra17;Val20;Gln22] | {H}-[CyA]YCQKW[Nle]W |
| | JzTx-V(1-29) | TCDSKRACC[Pra]GLVCQL |
| | | WCRKII{Amide} |
| 1067 | CyA-[Nle6;Pra17;Val20;Tyr27] | {H}-[CyA]YCQKW[Nle]W |
| | JzTx-V(1-29) | TCDSKRACC[Pra]GLVCKL |
| | | WCRYII{Amide} |
| 1068 | CyA-[Nle6;Pra17;Val20;Leu27] | {H}-[CyA]YCQKW[Nle]W |
| | JzTx-V(1-29) | TCDSKRACC[Pra]GLVCKL |
| | | WCRLII{Amide} |
| 1069 | CyA-[Nle6;Glu11,12;Pra17] | {H}-[CyA]YCQKW[Nle]W |
| | JzTx-V(1-29) | TCDEERACC[Pra]GLRCKL |
| | | WCRKII{Amide} |
| 1070 | CyA-[Nle6;Glu11,12;Pra17;Asp18] | {H}-[CyA]YCQKW[Nle]W |
| | JzTx-V(1-29) | TCDEERACC[Pra]DLRCKL |
| | | WCRKII{Amide} |
| 1071 | CyA-[Nle6;Glu11,12;Pra17;Val20] | {H}-[CyA]YCQKW[Nle]W |
| | JzTx-V(1-29) | TCDEERACC[Pra]GLVCKL |
| | | WCRKII{Amide} |
| 1072 | CyA-[Nle6;Glu11,12;Pra17;Gln22] | {H}-[CyA]YCQKW[Nle]W |
| | JzTx-V(1-29) | TCDEERACC[Pra]GLRCQL |
| | | WCRKII{Amide} |
| 1073 | CyA-[Nle6;Glu11,12;Pra17;Tyr27] | {H}-[CyA]YCQKW[Nle]W |
| | JzTx-V(1-29) | TCDEERACC[Pra]GLRCKL |
| | | WCRYII{Amide} |
| 1074 | CyA-[Nle6;Glu11,12;Pra17;Leu27] | {H}-[CyA]YCQKW[Nle]W |
| | JzTx-V(1-29) | TCDEERACC[Pra]GLRCKL |
| | | WCRLII{Amide} |
| 1075 | CyA-[Nle6;Glu11,12;Pra17;Val20;Gln22] | {H}-[CyA]YCQKW[Nle]W |
| | JzTx-V(1-29) | TCDEERACC[Pra]GLVCQL |
| | | WCRKII{Amide} |
| 1076 | CyA-[Nle6;Glu11,12;Pra17;Val20;Tyr27] | {H}-[CyA]YCQKW[Nle]W |
| | JzTx-V(1-29) | TCDEERACC[Pra]GLVCKL |
| | | WCRYII{Amide} |
| 1077 | CyA-[Nle6;Glu11,12;Pra17;Val20;Leu27] | {H}-[CyA]YCQKW[Nle]W |
| | JzTx-V(1-29) | TCDEERACC[Pra]GLVCKL |
| | | WCRLII{Amide} |
| 1078 | CyA-[Nle6;Glu12,18;Pra17;Val20] | {H}-[CyA]YCQKW[Nle]W |
| | JzTx-V(1-29) | TCDSERACC[Pra]ELVCKL |
| | | WCRKII{Amide} |
| 1079 | CyA-[Nle6;Glu12,18;Pra17;Gln22] | {H}-[CyA]YCQKW[Nle]W |
| | JzTx-V(1-29) | TCDSERACC[Pra]ELRCQL |
| | | WCRKII{Amide} |
| 1080 | CyA-[Nle6;Glu12,18;Pra17;Tyr27] | {H}-[CyA]YCQKW[Nle]W |
| | JzTx-V(1-29) | TCDSERACC[Pra]ELRCKL |
| | | WCRYII{Amide} |
| 1081 | CyA-[Nle6;Glu12,18;Pra17;Leu27] | {H}-[CyA]YCQKW[Nle]W |
| | JzTx-V(1-29) | TCDSERACC[Pra]ELRCKL |
| | | WCRLII{Amide} |
| 1082 | CyA-[Nle6;Glu12,18;Pra17;Val20;Gln22] | {H}-[CyA]YCQKW[Nle]W |
| | JzTx-V(1-29) | TCDSERACC[Pra]ELVCQL |
| | | WCRKII{Amide} |
| 1083 | CyA-[Nle6;Glu12,18;Pra17;Val20;Tyr27] | {H}-[CyA]YCQKW[Nle]W |
| | JzTx-V(1-29) | TCDSERACC[Pra]ELVCKL |
| | | WCRYII{Amide} |
| 1084 | CyA-[Nle6;Glu12,18;Pra17;Val20;Leu27] | {H}-[CyA]YCQKW[Nle]W |
| | JzTx-V(1-29) | TCDSERACC[Pra]ELVCKL |
| | | WCRLII{Amide} |
| 1085 | Pra-[Nle6;Glu11]JzTx-V(1-29) | {H}-[Pra]YCQKW[Nle]W |
| | | TCDEKRACCEGLRCKLWCRK |
| | | II{Amide} |
| 1086 | Pra-[Nle6;Glu14]JzTx-V(1-29) | {H}-[Pra]YCQKW[Nle]W |
| | | TCDSKRECCEGLRCKLWCRK |
| | | II{Amide} |
| 1087 | Pra-[Nle6;Ala12]JzTx-V(1-29) | {H}-[Pra]YCQKW[Nle]W |
| | | TCDSARACCEGLRCKLWCRK |
| | | II{Amide} |
| 1088 | Pra-[Nle6;Asp18]JzTx-V(1-29) | {H}-[Pra]YCQKW[Nle]W |
| | | TCDSKRACCEDLRCKLWCRK |
| | | II{Amide} |
| 1089 | Pra-[Nle6;Gln22]JzTx-V(1-29) | {H}-[Pra]YCQKW[Nle]W |
| | | TCDSKRACCEGLRCQLWCRK |
| | | II{Amide} |
| 1090 | Pra-[Nle6;Tyr27]JzTx-V(1-29) | {H}-[Pra]YCQKW[Nle]W |
| | | TCDSKRACCEGLRCKLWCRY |
| | | II{Amide} |
| 1091 | Pra-[Nle6;Leu27]JzTx-V(1-29) | {H}-[Pra]YCQKW[Nle]W |
| | | TCDSKRACCEGLRCKLWCRL |
| | | II{Amide} |
| 1092 | Pra-[Glu1;Nle6;Ala12]JzTx-V(1-29) | {H}-[Pra]ECQKW[Nle]W |
| | | TCDSARACCEGLRCKLWCRK |
| | | II{Amide} |
| 1093 | Pra-[Glu1;Nle6;Asp18]JzTx-V(1-29) | {H}-[Pra]ECQKW[Nle]W |
| | | TCDSKRACCEDLRCKLWCRK |
| | | II{Amide} |
| 1094 | Pra-[Glu1;Nle6;Val20]JzTx-V(1-29) | {H}-[Pra]ECQKW[Nle]W |
| | | TCDSKRACCEGLVCKLWCRK |
| | | II{Amide} |
| 1095 | Pra-[Glu1;Nle6;Gln22]JzTx-V(1-29) | {H}-[Pra]ECQKW[Nle]W |
| | | TCDSKRACCEGLRCQLWCRK |
| | | II{Amide} |
| 1096 | Pra-[Glu1;Nle6;Tyr27]JzTx-V(1-29) | {H}-[Pra]ECQKW[Nle]W |
| | | TCDSKRACCEGLRCKLWCRY |
| | | II{Amide} |
| 1097 | Pra-[Glu1;Nle6;Leu27]JzTx-V(1-29) | {H}-[Pra]ECQKW[Nle]W |
| | | TCDSKRACCEGLRCKLWCRL |
| | | II{Amide} |
| 1098 | Pra-[Nle6;Glu11;Ala12]JzTx-V(1-29) | {H}-[Pra]YCQKW[Nle]W |
| | | TCDEARACCEGLRCKLWCRK |
| | | II{Amide} |
| 1099 | Pra-[Nle6;Glu11;Asp18]JzTx-V(1-29) | {H}-[Pra]YCQKW[Nle]W |
| | | TCDEKRACCEDLRCKLWCRK |
| | | II{Amide} |
| 1100 | Pra-[Nle6;Glu11;Val20]JzTx-V(1-29) | {H}-[Pra]YCQKW[Nle]W |
| | | TCDEKRACCEGLVCKLWCRK |
| | | II{Amide} |
| 1101 | Pra-[Nle6;Glu11;Gln22]JzTx-V(1-29) | {H}-[Pra]YCQKW[Nle]W |
| | | TCDEKRACCEGLRCQLWCRK |
| | | II{Amide} |
| 1102 | Pra-[Nle6;Glu11;Tyr27]JzTx-V(1-29) | {H}-[Pra]YCQKW[Nle]W |
| | | TCDEKRACCEGLRCKLWCRY |
| | | II{Amide} |
| 1103 | Pra-[Nle6;Glu11;Leu27]JzTx-V(1-29) | {H}-[Pra]YCQKW[Nle]W |
| | | TCDEKRACCEGLRCKLWCRL |
| | | II{Amide} |
| 1104 | Pra-[Nle6;Glu12;Asp18]JzTx-V(1-29) | {H}-[Pra]YCQKW[Nle]W |
| | | TCDSERACCEDLRCKLWCRK |
| | | II{Amide} |
| 1105 | Pra-[Nle6;Glu12;Val20]JzTx-V(1-29) | {H}-[Pra]YCQKW[Nle]W |
| | | TCDSERACCEGLVCKLWCRK |
| | | II{Amide} |
| 1106 | Pra-[Nle6;Glu12;Gln22]JzTx-V(1-29) | {H}-[Pra]YCQKW[Nle]W |
| | | TCDSERACCEGLRCQLWCRK |
| | | II{Amide} |
| 1107 | Pra-[Nle6;Glu12;Tyr27]JzTx-V(1-29) | {H}-[Pra]YCQKW[Nle]W |
| | | TCDSERACCEGLRCKLWCRY |
| | | II{Amide} |
| 1108 | Pra-[Nle6;Glu12;Leu27]JzTx-V(1-29) | {H}-[Pra]YCQKW[Nle]W |
| | | TCDSERACCEGLRCKLWCRL |
| | | II{Amide} |
| 1109 | Pra-[Nle6;Ala12;Glu13]JzTx-V(1-29) | {H}-[Pra]YCQKW[Nle]W |
| | | TCDSAEACCEGLRCKLWCRK |
| | | II{Amide} |
| 1110 | Pra-[Nle6;Glu13;Asp18]JzTx-V(1-29) | {H}-[Pra]YCQKW[Nle]W |
| | | TCDSKEACCEDLRCKLWCRK |
| | | II{Amide} |
| 1111 | Pra-[Nle6;Glu13;Val20]JzTx-V(1-29) | {H}-[Pra]YCQKW[Nle]W |
| | | TCDSKEACCEGLVCKLWCRK |
| | | II{Amide} |
| 1112 | Pra-[Nle6;Glu13;Gln22]JzTx-V(1-29) | {H}-[Pra]YCQKW[Nle]W |
| | | TCDSKEACCEGLRCQLWCRK |
| | | II{Amide} |
| 1113 | Pra-[Nle6;Glu13;Tyr27]JzTx-V(1-29) | {H}-[Pra]YCQKW[Nle]W |
| | | TCDSKEACCEGLRCKLWCRY |
| | | II{Amide} |
| 1114 | Pra-[Nle6;Glu13;Leu27]JzTx-V(1-29) | {H}-[Pra]YCQKW[Nle]W |
| | | TCDSKEACCEGLRCKLWCRL |
| | | II{Amide} |
| 1115 | Pra-[Nle6;Ala12;Val20]JzTx-V(1-29) | {H}-[Pra]YCQKW[Nle]W |
| | | TCDSARACCEGLVCKLWCRK |
| | | II{Amide} |
| 1116 | Pra-[Nle6;Asp18;Val20]JzTx-V(1-29) | {H}-[Pra]YCQKW[Nle]W |
| | | TCDSKRACCEDLVCKLWCRK |
| | | II{Amide} |
| 1117 | Pra-[Nle6;Val20;Gln22]JzTx-V(1-29) | {H}-[Pra]YCQKW[Nle]W |
| | | TCDSKRACCEGLVCQLWCRK |
| | | II{Amide} |
| 1118 | Pra-[Nle6;Val20;Tyr27]JzTx-V(1-29) | {H}-[Pra]YCQKW[Nle]W |
| | | TCDSKRACCEGLVCKLWCRY |
| | | II{Amide} |
| 1119 | Pra-[Nle6;Val20;Leu27]JzTx-V(1-29) | {H}-[Pra]YCQKW[Nle]W |
| | | TCDSKRACCEGLVCKLWCRL |
| | | II{Amide} |
| 1120 | Pra-[Nle6;Glu11,12]JzTx-V(1-29) | {H}-[Pra]YCQKW[Nle]W |
| | | TCDEERACCEGLRCKLWCRK |
| | | II{Amide} |
| 1121 | Pra-[Nle6;Glu11,12;Asp18] | {H}-[Pra]YCQKW[Nle]W |
| | JzTx-V(1-29) | TCDEERACCEDLRCKLWCRK |
| | | II{Amide} |
| 1122 | Pra-[Nle6;Glu11,12;Val20] | {H}-[Pra]YCQKW[Nle]W |
| | JzTx-V(1-29) | TCDEERACCEGLVCKLWCRK |
| | | II{Amide} |
| 1123 | Pra-[Nle6;Glu11,12;Gln22] | {H}-[Pra]YCQKW[Nle]W |
| | JzTx-V(1-29) | TCDEERACCEGLRCQLWCRK |
| | | II{Amide} |
| 1124 | Pra-[Nle6;Glu11,12;Tyr27] | {H}-[Pra]YCQKW[Nle]W |
| | JzTx-V(1-29) | TCDEERACCEGLRCKLWCRY |
| | | II{Amide} |
| 1125 | Pra-[Nle6;Glu11,12;Leu27] | {H}-[Pra]YCQKW[Nle]W |
| | JzTx-V(1-29) | TCDEERACCEGLRCKLWCRL |
| | | II{Amide} |
| 1126 | Pra-[Nle6;Glu11,12;Val20;Gln22] | {H}-[Pra]YCQKW[Nle]W |
| | JzTx-V(1-29) | TCDEERACCEGLVCQLWCRK |
| | | II{Amide} |
| 1127 | Pra-[Nle6;Glu11,12;Val20;Tyr27] | {H}-[Pra]YCQKW[Nle]W |
| | JzTx-V(1-29) | TCDEERACCEGLVCKLWCRY |
| | | II{Amide} |
| 1128 | Pra-[Nle6;Glu11,12;Val20;Leu27] | {H}-[Pra]YCQKW[Nle]W |
| | JzTx-V(1-29) | TCDEERACCEGLVCKLWCRL |
| | | II{Amide} |
| 1129 | Pra-[Nle6;Glu12,18;Val20] | {H}-[Pra]YCQKW[Nle]W |
| | JzTx-V(1-29) | TCDSERACCEELVCKLWCRK |
| | | II{Amide} |
| 1130 | Pra-[Nle6;Glu12,18;Gln22] | {H}-[Pra]YCQKW[Nle]W |
| | JzTx-V(1-29) | TCDSERACCEELRCQLWCRK |
| | | II{Amide} |
| 1131 | Pra-[Nle6;Glu12,18;Tyr27] | {H}-[Pra]YCQKW[Nle]W |
| | JzTx-V(1-29) | TCDSERACCEELRCKLWCRY |
| | | II{Amide} |
| 1132 | Pra-[Nle6;Glu12,18;Leu27] | {H}-[Pra]YCQKW[Nle]W |
| | JzTx-V(1-29) | TCDSERACCEELRCKLWCRL |
| | | II{Amide} |
| 1133 | Pra-[Nle6;Glu12,18;Val20;Gln22] | {H}-[Pra]YCQKW[Nle]W |
| | JzTx-V(1-29) | TCDSERACCEELVCQLWCRK |
| | | II{Amide} |
| 1134 | Pra-[Nle6;Glu12,18;Val20;Tyr27] | {H}-[Pra]YCQKW[Nle]W |
| | JzTx-V(1-29) | TCDSERACCEELVCKLWCRY |
| | | II{Amide} |
| 1135 | Pra-[Nle6;Glu12,18;Val20;Leu27] | {H}-[Pra]YCQKW[Nle]W |
| | JzTx-V(1-29) | TCDSERACCEELVCKLWCRL |
| | | II{Amide} |
| 1136 | CyA-[Nle6;Glu11,28;Pra17;5-BrW24] | {H}-[CyA]YCQKW[Nle]W |
| | JzTx-V(1-29) | TCDEKRACC[Pra]GLRCKL |
| | | [5-BrW]CRKEI{Amide} |
| 1137 | CyA-[Nle6;Glu12,28;Pra17;5-BrW24] | {H}-[CyA]YCQKW[Nle]W |
| | JzTx-V(1-29) | TCDSERACC[Pra]GLRCKL |
| | | [5-BrW]CRKEI{Amide} |
| 1138 | CyA-[Nle6;Glu14,28;Pra17;5-BrW24] | {H}-[CyA]YCQKW[Nle]W |
| | JzTx-V(1-29) | TCDSKRECC[Pra]GLRCKL |
| | | [5-BrW]CRKEI{Amide} |
| 1139 | CyA-[Nle6;Ala12;Pra17;5-BrW24;Glu28] | {H}-[CyA]YCQKW[Nle]W |
| | JzTx-V(1-29) | TCDSARACC[Pra]GLRCKL |
| | | [5-BrW]CRKEI{Amide} |
| 1140 | CyA-[Nle6;Pra17;Asp18;5-BrW24;Glu28] | {H}-[CyA]YCQKW[Nle]W |
| | JzTx-V(1-29) | TCDSKRACC[Pra]DLRCKL |
| | | [5-BrW]CRKEI{Amide} |
| 1141 | CyA-[Nle6;Pra17;Val20;5-BrW24;Glu28] | {H}-[CyA]YCQKW[Nle]W |
| | JzTx-V(1-29) | TCDSKRACC[Pra]GLVCKL |
| | | [5-BrW]CRKEI{Amide} |
| 1142 | CyA-[Nle6;Pra17;Gln22;5-BrW24;Glu28] | {H}-[CyA]YCQKW[Nle]W |
| | JzTx-V(1-29) | TCDSKRACC[Pra]GLRCQL |
| | | [5-BrW]CRKEI{Amide} |
| 1143 | CyA-[Nle6;Pra17;5-BrW24;Tyr27;Glu28] | {H}-[CyA]YCQKW[Nle]W |
| | JzTx-V(1-29) | TCDSKRACC[Pra]GLRCKL |
| | | [5-BrW]CRYEI{Amide} |
| 1144 | CyA-[Nle6;Pra17;5-BrW24;Leu27;Glu28] | {H}-[CyA]YCQKW[Nle]W |
| | JzTx-V(1-29) | TCDSKRACC[Pra]GLRCKL |
| | | [5-BrW]CRLEI{Amide} |
| 1145 | CyA-[Glu1,28;Nle6;Ala12;Pra17;5-BrW24] | {H}-[CyA]ECQKW[Nle]W |
| | JzTx-V(1-29) | TCDSARACC[Pra]GLRCKL |
| | | [5-BrW]CRKEI{Amide} |
| 1146 | CyA-[Glu1,28;Nle6;Pra17;Asp18;5-BrW24] | {H}-[CyA]ECQKW[Nle]W |
| | JzTx-V(1-29) | TCDSKRACC[Pra]DLRCKL |
| | | [5-BrW]CRKEI{Amide} |
| 1147 | CyA-[Glu1,28;Nle6;Pra17;Val20;5-BrW24] | {H}-[CyA]ECQKW[Nle]W |
| | JzTx-V(1-29) | TCDSKRACC[Pra]GLVCKL |
| | | [5-BrW]CRKEI{Amide} |
| 1148 | CyA-[Glu1,28;Nle6;Pra17;Gln22;5-BrW24] | {H}-[CyA]ECQKW[Nle]W |
| | JzTx-V(1-29) | TCDSKRACC[Pra]GLRCQL |
| | | [5-BrW]CRKEI{Amide} |
| 1149 | CyA-[Glu1,28;Nle6;Pra17;5-BrW24;Tyr27] | {H}-[CyA]ECQKW[Nle]W |
| | JzTx-V(1-29) | TCDSKRACC[Pra]GLRCKL |
| | | [5-BrW]CRYEI{Amide} |
| 1150 | CyA-[Glu1,28;Nle6;Pra17;5-BrW24;Leu27] | {H}-[CyA]ECQKW[Nle]W |
| | JzTx-V(1-29) | TCDSKRACC[Pra]GLRCKL |
| | | [5-BrW]CRLEI{Amide} |
| 1151 | CyA-[Nle6;Glu11,28;Ala12;Pra17;5-BrW24] | {H}-[CyA]YCQKW[Nle]W |
| | JzTx-V(1-29) | TCDEARACC[Pra]GLRCKL |
| | | [5-BrW]CRKEI{Amide} |
| 1152 | CyA-[Nle6;Glu11,28;Pra17;Asp18;5-BrW24] | {H}-[CyA]YCQKW[Nle]W |
| | JzTx-V(1-29) | TCDEKRACC[Pra]DLRCKL |
| | | [5-BrW]CRKEI{Amide} |
| 1153 | CyA-[Nle6;Glu11,28;Pra17;Val20;5-BrW24] | {H}-[CyA]YCQKW[Nle]W |
| | JzTx-V(1-29) | TCDEKRACC[Pra]GLVCKL |
| | | [5-BrW]CRKEI{Amide} |
| 1154 | CyA-[Nle6;Glu11,28;Pra17;Gln22;5-BrW24] | {H}-[CyA]YCQKW[Nle]W |
| | JzTx-V(1-29) | TCDEKRACC[Pra]GLRCQL |
| | | [5-BrW]CRKEI{Amide} |
| 1155 | CyA-[Nle6;Glu11,28;Pra17;5-BrW24;Tyr27] | {H}-[CyA]YCQKW[Nle]W |
| | JzTx-V(1-29) | TCDEKRACC[Pra]GLRCKL |
| | | [5-BrW]CRYEI{Amide} |
| 1156 | CyA-[Nle6;Glu11,28;Pra17;5-BrW24;Leu27] | {H}-[CyA]YCQKW[Nle]W |
| | JzTx-V(1-29) | TCDEKRACC[Pra]GLRCKL |
| | | [5-BrW]CRLEI{Amide} |
| 1157 | CyA-[Nle6;Glu12,28;Pra17;Asp18;5-BrW24] | {H}-[CyA]YCQKW[Nle]W |
| | JzTx-V(1-29) | TCDSERACC[Pra]DLRCKL |
| | | [5-BrW]CRKEI{Amide} |
| 1158 | CyA-[Nle6;Glu12,28;Pra17;Val20;5-BrW24] | {H}-[CyA]YCQKW[Nle]W |
| | JzTx-V(1-29) | TCDSERACC[Pra]GLVCKL |
| | | [5-BrW]CRKEI{Amide} |
| 1159 | CyA-[Nle6;Glu12,28;Pra17;Gln22;5-BrW24] | {H}-[CyA]YCQKW[Nle]W |
| | JzTx-V(1-29) | TCDSERACC[Pra]GLRCQL |
| | | [5-BrW]CRKEI{Amide} |
| 1160 | CyA-[Nle6;Glu12,28;Pra17;5-BrW24;Tyr27] | {H}-[CyA]YCQKW[Nle]W |
| | JzTx-V(1-29) | TCDSERACC[Pra]GLRCKL |
| | | [5-BrW]CRYEI{Amide} |
| 1161 | CyA-[Nle6;Glu12,28;Pra17;5-BrW24;Leu27] | {H}-[CyA]YCQKW[Nle]W |
| | JzTx-V(1-29) | TCDSERACC[Pra]GLRCKL |
| | | [5-BrW]CRLEI{Amide} |
| 1162 | CyA-[Nle6;Ala12;Glu14,28;Pra17;5-BrW24] | {H}-[CyA]YCQKW[Nle]W |
| | JzTx-V(1-29) | TCDSARECC[Pra]GLRCKL |
| | | [5-BrW]CRKEI{Amide} |
| 1163 | CyA-[Nle6;Glu14,28;Pra17;Asp18;5-BrW24] | {H}-[CyA]YCQKW[Nle]W |
| | JzTx-V(1-29) | TCDSKRECC[Pra]DLRCKL |
| | | [5-BrW]CRKEI{Amide} |
| 1164 | CyA-[Nle6;Glu14,28;Pra17;Val20;5-BrW24] | {H}-[CyA]YCQKW[Nle]W |
| | JzTx-V(1-29) | TCDSKRECC[Pra]GLVCKL |
| | | [5-BrW]CRKEI{Amide} |
| 1165 | CyA-[Nle6;Glu14,28;Pra17;Gln22;5-BrW24] | {H}-[CyA]YCQKW[Nle]W |
| | JzTx-V(1-29) | TCDSKRECC[Pra]GLRCQL |
| | | [5-BrW]CRKEI{Amide} |
| 1166 | CyA-[Nle6;Glu14,28;Pra17;5-BrW24;Tyr27] | {H}-[CyA]YCQKW[Nle]W |
| | JzTx-V(1-29) | TCDSKRECC[Pra]GLRCKL |
| | | [5-BrW]CRYEI{Amide} |
| 1167 | CyA-[Nle6;Glu14,28;Pra17;5-BrW24;Leu27] | {H}-[CyA]YCQKW[Nle]W |
| | JzTx-V(1-29) | TCDSKRECC[Pra]GLRCKL |
| | | [5-BrW]CRLEI{Amide} |
| 1168 | CyA-[Nle6;Ala12;Pra17;Val20;5-BrW24; | {H}-[CyA]YCQKW[Nle]W |
| | Glu28]JzTx-V(1-29) | TCDSARACC[Pra]GLVCKL |
| | | [5-BrW]CRKEI{Amide} |
| 1169 | CyA-[Nle6;Pra17;Asp18;Val20;5-BrW24; | {H}-[CyA]YCQKW[Nle]W |
| | Glu28]JzTx-V(1-29) | TCDSKRACC[Pra]DLVCKL |
| | | [5-BrW]CRKEI{Amide} |
| 1170 | CyA-[Nle6;Pra17;Val20;Gln22;5-BrW24; | {H}-[CyA]YCQKW[Nle]W |
| | Glu28]JzTx-V(1-29) | TCDSKRACC[Pra]GLVCQL |
| | | [5-BrW]CRKEI{Amide} |
| 1171 | CyA-[Nle6;Pra17;Val20;5-BrW24;Tyr27; | {H}-[CyA]YCQKW[Nle]W |
| | Glu28]JzTx-V(1-29) | TCDSKRACC[Pra]GLVCKL |
| | | [5-BrW]CRYEI{Amide} |
| 1172 | CyA-[Nle6;Pra17;Val20;5-BrW24;Leu27; | {H}-[CyA]YCQKW[Nle]W |
| | Glu28]JzTx-V(1-29) | TCDSKRACC[Pra]GLVCKL |
| | | [5-BrW]CRLEI{Amide} |
| 1173 | CyA-[Nle6;Glu11,12,28;Pra17;5-BrW24] | {H}-[CyA]YCQKW[Nle]W |
| | JzTx-V(1-29) | TCDEERACC[Pra]GLRCKL |
| | | [5-BrW]CRKEI{Amide} |
| 1174 | CyA-[Nle6;Glu11,12,28;Pra17;Asp18; | {H}-[CyA]YCQKW[Nle]W |
| | 5-BrW24]JzTx-V(1-29) | TCDEERACC[Pra]DLRCKL |
| | | [5-BrW]CRKEI{Amide} |
| 1175 | CyA-[Nle6;Glu11,12,28;Pra17;Val20; | {H}-[CyA]YCQKW[Nle]W |
| | 5-BrW24]JzTx-V(1-29) | TCDEERACC[Pra]GLVCKL |
| | | [5-BrW]CRKEI{Amide} |
| 1176 | CyA-[Nle6;Glu11,12,28;Pra17;Gln22; | {H}-[CyA]YCQKW[Nle]W |
| | 5-BrW24]JzTx-V(1-29) | TCDEERACC[Pra]GLRCQL |
| | | [5-BrW]CRKEI{Amide} |
| 1177 | CyA-[Nle6;Glu11,12,28;Pra17;5-BrW24; | {H}-[CyA]YCQKW[Nle]W |
| | Tyr27]JzTx-V(1-29) | TCDEERACC[Pra]GLRCKL |
| | | [5-BrW]CRYEI{Amide} |
| 1178 | CyA-[Nle6;Glu11,12,28;Pra17;5-BrW24; | {H}-[CyA]YCQKW[Nle]W |
| | Leu27]JzTx-V(1-29) | TCDEERACC[Pra]GLRCKL |
| | | [5-BrW]CRLEI{Amide} |
| 1179 | CyA-[Nle6;Glu11,12,28;Pra17;Val20; | {H}-[CyA]YCQKW[Nle]W |
| | Gln22;5-BrW24]JzTx-V(1-29) | TCDEERACC[Pra]GLVCQL |
| | | [5-BrW]CRKEI{Amide} |
| 1180 | CyA-[Nle6;Glu11,12,28;Pra17;Val20; | {H}-[CyA]YCQKW[Nle]W |
| | 5-BrW24;Tyr27]JzTx-V(1-29) | TCDEERACC[Pra]GLVCKL |
| | | [5-BrW]CRYEI{Amide} |
| 1181 | CyA-[Nle6;Glu11,12,28;Pra17;Val20; | {H}-[CyA]YCQKW[Nle]W |
| | 5-BrW24;Leu27]JzTx-V(1-29) | TCDEERACC[Pra]GLVCKL |
| | | [5-BrW]CRLEI {Amide} |
| 1182 | CyA-[Nle6;Glu12,18,28;Pra17;Val20; | {H}-[CyA]YCQKW[Nle]W |
| | 5-BrW24]JzTx-V(1-29) | TCDSERACC[Pra]ELVCKL |
| | | [5-BrW]CRKEI{Amide} |
| 1183 | CyA-[Nle6;Glu12,18,28;Pra17;Gln22; | {H}-[CyA]YCQKW[Nle]W |
| | 5-BrW24]JzTx-V(1-29) | TCDSERACC[Pra]ELRCQL |
| | | [5-BrW]CRKEI{Amide} |
| 1184 | CyA-[Nle6;Glu12,18,28;Pra17;5-BrW24; | {H}-[CyA]YCQKW[Nle]W |
| | Tyr27]JzTx-V(1-29) | TCDSERACC[Pra]ELRCKL |
| | | [5-BrW]CRYEI{Amide} |
| 1185 | CyA-[Nle6;Glu12,18,28;Pra17;5-BrW24; | {H}-[CyA]YCQKW[Nle]W |
| | Leu27]JzTx-V(1-29) | TCDSERACC[Pra]ELRCKL |
| | | [5-BrW]CRLEI{Amide} |
| 1186 | CyA-[Nle6;Glu12,18,28;Pra17;Val20; | {H}-[CyA]YCQKW[Nle]W |
| | Gln22;5-BrW24]JzTx-V(1-29) | TCDSERACC[Pra]ELVCQL |
| | | [5-BrW]CRKEI{Amide} |
| 1187 | CyA-[Nle6;Glu12,18,28;Pra17;Val20; | {H}-[CyA]YCQKW[Nle]W |
| | 5-BrW24;Tyr27]JzTx-V(1-29) | TCDSERACC[Pra]ELVCKL |
| | | [5-BrW]CRYEI{Amide} |
| 1188 | CyA-[Nle6;Glu12,18,28;Pra17;Val20; | {H}-[CyA]YCQKW[Nle]W |
| | 5-BrW24;Leu27]JzTx-V(1-29) | TCDSERACC[Pra]ELVCKL |
| | | [5-BrW]CRLEI{Amide} |
| 1189 | CyA-[Nle6;Pra17;5-BrW24;Tyr27;Asn28; | {H}-[CyA]YCQKW[Nle]W |
| | Leu29]JzTx-V(1-29) | TCDSKRACC[Pra]GLRCKL |
| | | [5-BrW]CRYNL{Amide} |
| 1190 | Pra-[Nle6;Glu11,28;5-BrW24]JzTx-V(1-29) | {H}-[Pra]YCQKW[Nle]W |
| | | TCDEKRACCEGLRCKL |
| | | [5-BrW]CRKEI{Amide} |
| 1191 | Pra-[Nle6;Glu12,28;5-BrW24]JzTx-V(1-29) | {H}-[Pra]YCQKW[Nle]W |
| | | TCDSERACCEGLRCKL |
| | | [5-BrW]CRKEI{Amide} |
| 1192 | Pra-[Nle6;Glu14,28;5-BrW24]JzTx-V(1-29) | {H}-[Pra]YCQKW[Nle]W |
| | | TCDSKRECCEGLRCKL |
| | | [5-BrW]CRKEI{Amide} |
| 1193 | Pra-[Nle6;Ala12;5-BrW24;Glu28] | {H}-[Pra]YCQKW[Nle]W |
| | JzTx-V(1-29) | TCDSARACCEGLRCKL |
| | | [5-BrW]CRKEI{Amide} |
| 1194 | Pra-[Nle6;Asp18;5-BrW24;Glu28] | {H}-[Pra]YCQKW[Nle]W |
| | JzTx-V(1-29) | TCDSKRACCEDLRCKL |
| | | [5-BrW]CRKEI{Amide} |
| 1195 | Pra-[Nle6;Val20;5-BrW24;Glu28] | {H}-[Pra]YCQKW[Nle]W |
| | JzTx-V(1-29) | TCDSKRACCEGLVCKL |
| | | [5-BrW]CRKEI{Amide} |
| 1196 | Pra-[Nle6;Gln22;5-BrW24;Glu28] | {H}-[Pra]YCQKW[Nle]W |
| | JzTx-V(1-29) | TCDSKRACCEGLRCQL |
| | | [5-BrW]CRKEI{Amide} |
| 1197 | Pra-[Nle6;5-BrW24;Tyr27;Glu28] | {H}-[Pra]YCQKW[Nle]W |
| | JzTx-V(1-29) | TCDSKRACCEGLRCKL |
| | | [5-BrW]CRYEI{Amide} |
| 1198 | Pra-[Nle6;5-BrW24;Leu27;Glu28] | {H}-[Pra]YCQKW[Nle]W |
| | JzTx-V(1-29) | TCDSKRACCEGLRCKL |
| | | [5-BrW]CRLEI{Amide} |
| 1199 | Pra-[Glu1,28;Nle6;Ala12;5-BrW24] | {H}-[Pra]ECQKW[Nle]W |
| | JzTx-V(1-29) | TCDSARACCEGLRCKL |
| | | [5-BrW]CRKEI{Amide} |
| 1200 | Pra-[Glu1,28;Nle6;Asp18;5-BrW24] | {H}-[Pra]ECQKW[Nle]W |
| | JzTx-V(1-29) | TCDSKRACCEDLRCKL |
| | | [5-BrW]CRKEI{Amide} |
| 1201 | Pra-[Glu1,28;Nle6;Val20;5-BrW24] | {H}-[Pra]ECQKW[Nle]W |
| | JzTx-V(1-29) | TCDSKRACCEGLVCKL |
| | | [5-BrW]CRKEI{Amide} |
| 1202 | Pra-[Glu1,28;Nle6;Gln22;5-BrW24] | {H}-[Pra]ECQKW[Nle]W |
| | JzTx-V(1-29) | TCDSKRACCEGLRCQL |
| | | [5-BrW]CRKEI{Amide} |
| 1203 | Pra-[Glu1,28;Nle6;5-BrW24;Tyr27] | {H}-[Pra]ECQKW[Nle]W |
| | JzTx-V(1 -29) | TCDSKRACCEGLRCKL |
| | | [5-BrW]CRYET{Amide} |
| 1204 | Pra-[Glu1,28;Nle6;5-BrW24;Leu27] | {H}-[Pra]ECQKW[Nle]W |
| | JzTx-V(1-29) | TCDSKRACCEGLRCKL |
| | | [5-BrW]CRLEI{Amide} |
| 1205 | Pra-[Nle6;Glu11,28;Ala12;5-BrW24] | {H}-[Pra]YCQKW[Nle]W |
| | JzTx-V(1-29) | TCDEARACCEGLRCKL |
| | | [5-BrW]CRKEI{Amide} |
| 1206 | Pra-[Nle6;Glu11,28;Asp18;5-BrW24] | {H}-[Pra]YCQKW[Nle]W |
| | JzTx-V(1-29) | TCDEKRACCEDLRCKL |
| | | [5-BrW]CRKEI{Amide} |
| 1207 | Pra-[Nle6;Glu11,28;Val20;5-BrW24] | {H}-[Pra]YCQKW[Nle]W |
| | JzTx-V(1-29) | TCDEKRACCEGLVCKL |
| | | [5-BrW]CRKEI{Amide} |
| 1208 | Pra-[Nle6;Glu11,28;Gln22;5-BrW24] | {H}-[Pra]YCQKW[Nle]W |
| | JzTx-V(1-29) | TCDEKRACCEGLRCQL |
| | | [5-BrW]CRKEI{Amide} |
| 1209 | Pra-[Nle6;Glu11,28;5-BrW24;Tyr27] | {H}-[Pra]YCQKW[Nle]W |
| | JzTx-V(1-29) | TCDEKRACCEGLRCKL |
| | | [5-BrW]CRYET{Amide} |
| 1210 | Pra-[Nle6;Glu11,28;5-BrW24;Leu27] | {H}-[Pra]YCQKW[Nle]W |
| | JzTx-V(1-29) | TCDEKRACCEGLRCKL |
| | | [5-BrW]CRLEI{Amide} |
| 1211 | Pra-[Nle6;Glu12,28;Asp18;5-BrW24] | {H}-[Pra]YCQKW[Nle]W |
| | JzTx-V(1-29) | TCDSERACCEDLRCKL |
| | | [5-BrW]CRKEI{Amide} |
| 1212 | Pra-[Nle6;Glu12,28;Val20;5-BrW24] | {H}-[Pra]YCQKW[Nle]W |
| | JzTx-V(1-29) | TCDSERACCEGLVCKL |
| | | [5-BrW]CRKEI{Amide} |
| 1213 | Pra-[Nle6;Glu12,28;Gln22;5-BrW24] | {H}-[Pra]YCQKW[Nle]W |
| | JzTx-V(1-29) | TCDSERACCEGLRCQL |
| | | [5-BrW]CRKEI{Amide} |
| 1214 | Pra-[Nle6;Glu12,28;5-BrW24;Tyr27] | {H}-[Pra]YCQKW[Nle]W |
| | JzTx-V(1-29) | TCDSERACCEGLRCKL |
| | | [5-BrW]CRYET{Amide} |
| 1215 | Pra-[Nle6;Glu12,28;5-BrW24;Leu27] | {H}-[Pra]YCQKW[Nle]W |
| | JzTx-V(1-29) | TCDSERACCEGLRCKL |
| | | [5-BrW]CRLEI{Amide} |
| 1216 | Pra-[Nle6;Ala12;Glu13,28;5-BrW24] | {H}-[Pra]YCQKW[Nle]W |
| | JzTx-V(1-29) | TCDSAEACCEGLRCKL |
| | | [5-BrW]CRKEI{Amide} |
| 1217 | Pra-[Nle6;Glu13,28;Asp18;5-BrW24] | {H}-[Pra]YCQKW[Nle]W |
| | JzTx-V(1-29) | TCDSKEACCEDLRCKL |
| | | [5-BrW]CRKEI{Amide} |
| 1218 | Pra-[Nle6;Glu13,28;Val20;5-BrW24] | {H}-[Pra]YCQKW[Nle]W |
| | JzTx-V(1-29) | TCDSKEACCEGLVCKL |
| | | [5-BrW]CRKEI{Amide} |
| 1219 | Pra-[Nle6;Glu13,28;Gln22;5-BrW24] | {H}-[Pra]YCQKW[Nle]W |
| | JzTx-V(1-29) | TCDSKEACCEGLRCQL |
| | | [5-BrW]CRKEI{Amide} |
| 1220 | Pra-[Nle6;Glu13,28;5-BrW24;Tyr27] | {H}-[Pra]YCQKW[Nle]W |
| | JzTx-V(1-29) | TCDSKEACCEGLRCKL |
| | | [5-BrW]CRYEI{Amide} |
| 1221 | Pra-[Nle6;Glu13,28;5-BrW24;Leu27] | {H}-[Pra]YCQKW[Nle]W |
| | JzTx-V(1-29) | TCDSKEACCEGLRCKL |
| | | [5-BrW]CRLEI{Amide} |
| 1222 | Pra-[Nle6;Ala12;Val20;5-BrW24;Glu28] | {H}-[Pra]YCQKW[Nle]W |
| | JzTx-V(1-29) | TCDSARACCEGLVCKL |
| | | [5-BrW]CRKEI{Amide} |
| 1223 | Pra-[Nle6;Asp18;Val20;5-BrW24;Glu28] | {H}-[Pra]YCQKW[Nle]W |
| | JzTx-V(1-29) | TCDSKRACCEDLVCKL |
| | | [5-BrW]CRKEI{Amide} |
| 1224 | Pra-[Nle6;Val20;Gln22;5-BrW24;Glu28] | {H}-[Pra]YCQKW[Nle]W |
| | JzTx-V(1-29) | TCDSKRACCEGLVCQL |
| | | [5-BrW]CRKEI{Amide} |
| 1225 | Pra-[Nle6;Val20;5-BrW24;Tyr27;Glu28] | {H}-[Pra]YCQKW[Nle]W |
| | JzTx-V(1-29) | TCDSKRACCEGLVCKL |
| | | [5-BrW]CRYEI{Amide} |
| 1226 | Pra-[Nle6;Val20;5-BrW24;Leu27;Glu28] | {H}-[Pra]YCQKW[Nle]W |
| | JzTx-V(1-29) | TCDSKRACCEGLVCKL |
| | | [5-BrW]CRLEI{Amide} |
| 1227 | Pra-[Nle6;Glu11,12,28;5-BrW24] | {H}-[Pra]YCQKW[Nle]W |
| | JzTx-V(1-29) | TCDEERACCEGLRCKL |
| | | [5-BrW]CRKEI{Amide} |
| 1228 | Pra-[Nle6;Glu11,12,28;Asp18;5-BrW24] | {H}-[Pra]YCQKW[Nle]W |
| | JzTx-V(1-29) | TCDEERACCEDLRCKL |
| | | [5-BrW]CRKEI{Amide} |
| 1229 | Pra-[Nle6;Glu11,12,28;Val20;5-BrW24] | {H}-[Pra]YCQKW[Nle]W |
| | JzTx-V(1-29) | TCDEERACCEGLVCKL |
| | | [5-BrW]CRKEI{Amide} |
| 1230 | Pra-[Nle6;Glu11,12,28;Gln22;5-BrW24] | {H}-[Pra]YCQKW[Nle]W |
| | JzTx-V(1-29) | TCDEERACCEGLRCQL |
| | | [5-BrW]CRKEI{Amide} |
| 1231 | Pra-[Nle6;Glu11,12,28;5-BrW24;Tyr27] | {H}-[Pra]YCQKW[Nle]W |
| | JzTx-V(1-29) | TCDEERACCEGLRCKL |
| | | [5-BrW]CRYEI{Amide} |
| 1232 | Pra-[Nle6;Glu11,12,28;5-BrW24;Leu27] | {H}-[Pra]YCQKW[Nle]W |
| | JzTx-V(1-29) | TCDEERACCEGLRCKL |
| | | [5-BrW]CRLEI{Amide} |
| 1233 | Pra-[Nle6;Glu11,12,28;Val20;Gln22; | {H}-[Pra]YCQKW[Nle]W |
| | 5-BrW24]JzTx-V(1-29) | TCDEERACCEGLVCQL |
| | | [5-BrW]CRKEI{Amide} |
| 1234 | Pra-[Nle6;Glu11,12,28;Val20;5-BrW24; | {H}-[Pra]YCQKW[Nle]W |
| | Tyr27]JzTx-V(1-29) | TCDEERACCEGLVCKL |
| | | [5-BrW]CRYEI{Amide} |
| 1235 | Pra-[Nle6;Glu11,12,28;Val20;5-BrW24; | {H}-[Pra]YCQKW[Nle]W |
| | Leu27]JzTx-V(1-29) | TCDEERACCEGLVCKL |
| | | [5-BrW]CRLEI{Amide} |
| 1236 | Pra-[Nle6;Glu12,18,28;Val20;5-BrW24] | {H}-[Pra]YCQKW[Nle]W |
| | JzTx-V(1-29) | TCDSERACCEELVCKL |
| | | [5-BrW]CRKEI{Amide} |
| 1237 | Pra-[Nle6;Glu12,18,28;Gln22;5-BrW24] | {H}-[Pra]YCQKW[Nle]W |
| | JzTx-V(1-29) | TCDSERACCEELRCQL |
| | | [5-BrW]CRKEI{Amide} |
| 1238 | Pra-[Nle6;Glu12,18,28;5-BrW24;Tyr27] | {H}-[Pra]YCQKW[Nle]W |
| | JzTx-V(1-29) | TCDSERACCEELRCKL |
| | | [5-BrW]CRYEI{Amide} |
| 1239 | Pra-[Nle6;Glu12,18,28;5-BrW24;Leu27] | {H}-[Pra]YCQKW[Nle]W |
| | JzTx-V(1-29) | TCDSERACCEELRCKL |
| | | [5-BrW]CRLEI{Amide} |
| 1240 | Pra-[Nle6;Glu12,18,28;Val20;Gln22; | {H}-[Pra]YCQKW[Nle]W |
| | 5-BrW24]JzTx-V(1-29) | TCDSERACCEELVCQL |
| | | [5-BrW]CRKEI{Amide} |
| 1241 | Pra-[Nle6;Glu12,18,28;Val20;5-BrW24; | {H}-[Pra]YCQKW[Nle]W |
| | Tyr27]JzTx-V(1-29) | TCDSERACCEELVCKL |
| | | [5-BrW]CRYEI{Amide} |
| 1242 | Pra-[Nle6;Glu12,18,28;Val20;5-BrW24; | {H}-[Pra]YCQKW[Nle]W |
| | Leu27]JzTx-V(1 -29) | TCDSERACCEELVCKL |
| | | [5-BrW]CRLEI{Amide} |
| 1243 | Pra-[Nle6;5-BrW24;Tyr27;Asn28;Leu29] | {H}-[Pra]YCQKW[Nle]W |
| | JzTx-V(1-29) | TCDSKRACCEGLRCKL |
| | | [5-BrW]CRYNL{Amide} |
| 1244 | CyA-[Nle6;Glu11;Pra17;5-BrW24] | {H}-[CyA]YCQKW[Nle]W |
| | JzTx-V(1-29) | TCDEKRACC[Pra]GLRCKL |
| | | [5-BrW]CRKII{Amide} |
| 1245 | CyA-[Nle6;Glu12;Pra17;5-BrW24] | {H}-[CyA]YCQKW[Nle]W |
| | JzTx-V(1-29) | TCDSERACC[Pra]GLRCKL |
| | | [5-BrW]CRKII{Amide} |
| 1246 | CyA-[Nle6;Glu14;Pra17;5-BrW24] | {H}-[CyA]YCQKW[Nle]W |
| | JzTx-V(1-29) | TCDSKRECC[Pra]GLRCKL |
| | | [5-BrW]CRKII{Amide} |
| 1247 | CyA-[Nle6;Ala12;Pra17;5-BrW24] | {H}-[CyA]YCQKW[Nle]W |
| | JzTx-V(1-29) | TCDSARACC[Pra]GLRCKL |
| | | [5-BrW]CRKII{Amide} |
| 1248 | CyA-[Nle6;Pra17;Asp18;5-BrW24] | {H}-[CyA]YCQKW[Nle]W |
| | JzTx-V(1-29) | TCDSKRACC[Pra]DLRCKL |
| | | [5-BrW]CRKII{Amide} |
| 1249 | CyA-[Nle6;Pra17;Val20;5-BrW24] | {H}-[CyA]YCQKW[Nle]W |
| | JzTx-V(1-29) | TCDSKRACC[Pra]GLVCKL |
| | | [5-BrW]CRKII{Amide} |
| 1250 | CyA-[Nle6;Pra17;Gln22;5-BrW24] | {H}-[CyA]YCQKW[Nle]W |
| | JzTx-V(1-29) | TCDSKRACC[Pra]GLRCQL |
| | | [5-BrW]CRKII{Amide} |
| 1251 | CyA-[Nle6;Pra17;5-BrW24;Tyr27] | {H}-[CyA]YCQKW[Nle]W |
| | JzTx-V(1-29) | TCDSKRACC[Pra]GLRCKL |
| | | [5-BrW]CRYII{Amide} |
| 1252 | CyA-[Nle6;Pra17;5-BrW24;Leu27] | {H}-[CyA]YCQKW[Nle]W |
| | JzTx-V(1-29) | TCDSKRACC[Pra]GLRCKL |
| | | [5-BrW]CRLII{Amide} |
| 1253 | CyA-[Glu1;Nle6;Ala12;Pra17; | {H}-[CyA]ECQKW[Nle]W |
| | 5-BrW24]JzTx-V(1-29) | TCDSARACC[Pra]GLRCKL |
| | | [5-BrW]CRKII{Amide} |
| 1254 | CyA-[Glu1;Nle6;Pra17;Asp18; | {H}-[CyA]ECQKW[Nle]W |
| | 5-BrW24]JzTx-V(1-29) | TCDSKRACC[Pra]DLRCKL |
| | | [5-BrW]CRKII{Amide} |
| 1255 | CyA-[Glu1;Nle6;Pra17;Val20;5-BrW24] | {H}-[CyA]ECQKW[Nle]W |
| | JzTx-V(1-29) | TCDSKRACC[Pra]GLVCKL |
| | | [5-BrW]CRKII{Amide} |
| 1256 | CyA-[Glu1;Nle6;Pra17;Gln22;5-BrW24] | {H}-[CyA]ECQKW[Nle]W |
| | JzTx-V(1-29) | TCDSKRACC[Pra]GLRCQL |
| | | [5-BrW]CRKII{Amide} |
| 1257 | CyA-[Glu1;Nle6;Pra17;5-BrW24;Tyr27] | {H}-[CyA]ECQKW[Nle]W |
| | JzTx-V(1-29) | TCDSKRACC[Pra]GLRCKL |
| | | [5-BrW]CRYII{Amide} |
| 1258 | CyA-[Glu1;Nle6;Pra17;5-BrW24;Leu27] | {H}-[CyA]ECQKW[Nle]W |
| | JzTx-V(1-29) | TCDSKRACC[Pra]GLRCKL |
| | | [5-BrW]CRLII{Amide} |
| 1259 | CyA-[Nle6;Glu11;Ala12;Pra17; | {H}-[CyA]YCQKW[Nle]W |
| | 5-BrW24]JzTx-V(1-29) | TCDEARACC[Pra]GLRCKL |
| | | [5-BrW]CRKII{Amide} |
| 1260 | CyA-[Nle6;Glu11;Pra17;Asp18; | {H}-[CyA]YCQKW[Nle]W |
| | 5-BrW24]JzTx-V(1-29) | TCDEKRACC[Pra]DLRCKL |
| | | [5-BrW]CRKII{Amide} |
| 1261 | CyA-[Nle6;Glu11;Pra17;Val20; | {H}-[CyA]YCQKW[Nle]W |
| | 5-BrW24]JzTx-V(1-29) | TCDEKRACC[Pra]GLVCKL |
| | | [5-BrW]CRKII{Amide} |
| 1262 | CyA-[Nle6;Glu11;Pra17;Gln22; | {H}-[CyA]YCQKW[Nle]W |
| | 5-BrW24]JzTx-V(1-29) | TCDEKRACC[Pra]GLRCQL |
| | | [5-BrW]CRKII{Amide} |
| 1263 | CyA-[Nle6;Glu11;Pra17;5-BrW24; | {H}-[CyA]YCQKW[Nle]W |
| | Tyr27]JzTx-V(1-29) | TCDEKRACC[Pra]GLRCKL |
| | | [5-BrW]CRYII{Amide} |
| 1264 | CyA-[Nle6;Glu11;Pra17;5-BrW24; | {H}-[CyA]YCQKW[Nle]W |
| | Leu27]JzTx-V(1-29) | TCDEKRACC[Pra]GLRCKL |
| | | [5-BrW]CRLII{Amide} |
| 1265 | CyA-[Nle6;Glu12;Pra17;Asp18; | {H}-[CyA]YCQKW[Nle]W |
| | 5-BrW24]JzTx-V(1-29) | TCDSERACC[Pra]DLRCKL |
| | | [5-BrW]CRKII{Amide} |
| 1266 | CyA-[Nle6;Glu12;Pra17;Val20; | {H}-[CyA]YCQKW[Nle]W |
| | 5-BrW24]JzTx-V(1-29) | TCDSERACC[Pra]GLVCKL |
| | | [5-BrW]CRKII{Amide} |
| 1267 | CyA-[Nle6;Glu12;Pra17;Gln22; | {H}-[CyA]YCQKW[Nle]W |
| | 5-BrW24]JzTx-V(1-29) | TCDSERACC[Pra]GLRCQL |
| | | [5-BrW]CRKII{Amide} |
| 1268 | CyA-[Nle6;Glu12;Pra17;5-BrW24; | {H}-[CyA]YCQKW[Nle]W |
| | Tyr27]JzTx-V(1-29) | TCDSERACC[Pra]GLRCKL |
| | | [5-BrW]CRYII{Amide} |
| 1269 | CyA-[Nle6;Glu12;Pra17;5-BrW24; | {H}-[CyA]YCQKW[Nle]W |
| | Leu27]JzTx-V(1-29) | TCDSERACC[Pra]GLRCKL |
| | | [5-BrW]CRLII{Amide} |
| 1270 | CyA-[Nle6;Ala12;Glu14;Pra17; | {H}-[CyA]YCQKW[Nle]W |
| | 5-BrW24]JzTx-V(1-29) | TCDSARECC[Pra]GLRCKL |
| | | [5-BrW]CRKII{Amide} |
| 1271 | CyA-[Nle6;Glu14;Pra17;Asp18; | {H}-[CyA]YCQKW[Nle]W |
| | 5-BrW24]JzTx-V(1-29) | TCDSKRECC[Pra]DLRCKL |
| | | [5-BrW]CRKII{Amide} |
| 1272 | CyA-[Nle6;Glu14;Pra17;Val20; | {H}-[CyA]YCQKW[Nle]W |
| | 5-BrW24]JzTx-V(1-29) | TCDSKRECC[Pra]GLVCKL |
| | | [5-BrW]CRKII{Amide} |
| 1273 | CyA-[Nle6;Glu14;Pra17;Gln22; | {H}-[CyA]YCQKW[Nle]W |
| | 5-BrW24]JzTx-V(1-29) | TCDSKRECC[Pra]GLRCQL |
| | | [5-BrW]CRKII{Amide} |
| 1274 | CyA-[Nle6;Glu14;Pra17;5-BrW24; | {H}-[CyA]YCQKW[Nle]W |
| | Tyr27]JzTx-V(1-29) | TCDSKRECC[Pra]GLRCKL |
| | | [5-BrW]CRYII{Amide} |
| 1275 | CyA-[Nle6;Glu14;Pra17;5-BrW24; | {H}-[CyA]YCQKW[Nle]W |
| | Leu27]JzTx-V(1-29) | TCDSKRECC[Pra]GLRCKL |
| | | [5-BrW]CRLII{Amide} |
| 1276 | CyA-[Nle6;Ala12;Pra17;Val20; | {H}-[CyA]YCQKW[Nle]W |
| | 5-BrW24]JzTx-V(1-29) | TCDSARACC[Pra]GLVCKL |
| | | [5-BrW]CRKII{Amide} |
| 1277 | CyA-[Nle6;Pra17;Asp18;Val20; | {H}-[CyA]YCQKW[Nle]W |
| | 5-BrW24]JzTx-V(1-29) | TCDSKRACC[Pra]DLVCKL |
| | | [5-BrW]CRKII{Amide} |
| 1278 | CyA-[Nle6;Pra17;Val20;Gln22; | {H}-[CyA]YCQKW[Nle]W |
| | 5-BrW24]JzTx-V(1-29) | TCDSKRACC[Pra]GLVCQL |
| | | [5-BrW]CRKII{Amide} |
| 1279 | CyA-[Nle6;Pra17;Val20;5-BrW24; | {H}-[CyA]YCQKW[Nle]W |
| | Tyr27]JzTx-V(1-29) | TCDSKRACC[Pra]GLVCKL |
| | | [5-BrW]CRYII{Amide} |
| 1280 | CyA-[Nle6;Pra17;Val20;5-BrW24; | {H}-[CyA]YCQKW[Nle]W |
| | Leu27]JzTx-V(1-29) | TCDSKRACC[Pra]GLVCKL |
| | | [5-BrW]CRLII{Amide} |
| 1281 | CyA-[Nle6;Glu11,12;Pra17; | {H}-[CyA]YCQKW[Nle]W |
| | 5-BrW24]JzTx-V(1-29) | TCDEERACC[Pra]GLRCKL |
| | | [5-BrW]CRKII{Amide} |
| 1282 | CyA-[Nle6;Glu11,12;Pra17;Asp18; | {H}-[CyA]YCQKW[Nle]W |
| | 5-BrW24]JzTx-V(1-29) | TCDEERACC[Pra]DLRCKL |
| | | [5-BrW]CRKII{Amide} |
| 1283 | CyA-[Nle6;Glu11,12;Pra17;Val20; | {H}-[CyA]YCQKW[Nle]W |
| | 5-BrW24]JzTx-V(1-29) | TCDEERACC[Pra]GLVCKL |
| | | [5-BrW]CRKII{Amide} |
| 1284 | CyA-[Nle6;Glu11,12;Pra17;Gln22; | {H}-[CyA]YCQKW[Nle]W |
| | 5-BrW24]JzTx-V(1-29) | TCDEERACC[Pra]GLRCQL |
| | | [5-BrW]CRKII{Amide} |
| 1285 | CyA-[Nle6;Glu11,12;Pra17;5-BrW24; | {H}-[CyA]YCQKW[Nle]W |
| | Tyr27]JzTx-V(1-29) | TCDEERACC[Pra]GLRCKL |
| | | [5-BrW]CRYII{Amide} |
| 1286 | CyA-[Nle6;Glu11,12;Pra17;5-BrW24; | {H}-[CyA]YCQKW[Nle]W |
| | Leu27]JzTx-V(1-29) | TCDEERACC[Pra]GLRCKL |
| | | [5-BrW]CRLII{Amide} |
| 1287 | CyA-[Nle6;Glu11,12;Pra17;Val20; | {H}-[CyA]YCQKW[Nle]W |
| | Gln22;5-BrW24]JzTx-V(1-29) | TCDEERACC[Pra]GLVCQL |
| | | [5-BrW]CRKII{Amide} |
| 1288 | CyA-[Nle6;Glu11,12;Pra17;Val20; | {H}-[CyA]YCQKW[Nle]W |
| | 5-BrW24;Tyr27]JzTx-V(1-29) | TCDEERACC[Pra]GLVCKL |
| | | [5-BrW]CRYII{Amide} |
| 1289 | CyA-[Nle6;Glu11,12;Pra17;Val20; | {H}-[CyA]YCQKW[Nle]W |
| | 5-BrW24;Leu27]JzTx-V(1-29) | TCDEERACC[Pra]GLVCKL |
| | | [5-BrW]CRLII{Amide} |
| 1290 | CyA-[Nle6;Glu12,18;Pra17;Val20; | {H}-[CyA]YCQKW[Nle]W |
| | 5-BrW24]JzTx-V(1-29) | TCDSERACC[Pra]ELVCKL |
| | | [5-BrW]CRKII{Amide} |
| 1291 | CyA-[Nle6;Glu12,18;Pra17;Gln22; | {H}-[CyA]YCQKW[Nle]W |
| | 5-BrW24]JzTx-V(1-29) | TCDSERACC[Pra]ELRCQL |
| | | [5-BrW]CRKII{Amide} |
| 1292 | CyA-[Nle6;Glu12,18;Pra17;5-BrW24; | {H}-[CyA]YCQKW[Nle]W |
| | Tyr27]JzTx-V(1 -29) | TCDSERACC[Pra]ELRCKL |
| | | [5-BrW]CRYII{Amide} |
| 1293 | CyA-[Nle6;Glu12,18;Pra17;5-BrW24; | {H}-[CyA]YCQKW[Nle]W |
| | Leu27]JzTx-V(1 -29) | TCDSERACC[Pra]ELRCKL |
| | | [5-BrW]CRLII{Amide} |
| 1294 | CyA-[Nle6;Glu12,18;Pra17;Val20; | {H}-[CyA]YCQKW[Nle]W |
| | Gln22;5-BrW24]JzTx-V(1-29) | TCDSERACC[Pra]ELVCQL |
| | | [5-BrW]CRKII{Amide} |
| 1295 | CyA-[Nle6;Glu12,18;Pra17;Val20; | {H}-[CyA]YCQKW[Nle]W |
| | 5-BrW24;Tyr27]JzTx-V(1-29) | TCDSERACC[Pra]ELVCKL |
| | | [5-BrW]CRYII{Amide} |
| 1296 | CyA-[Nle6;Glu12,18;Pra17;Val20; | {H}-[CyA]YCQKW[Nle]W |
| | 5-BrW24;Leu27]JzTx-V(1-29) | TCDSERACC[Pra]ELVCKL |
| | | [5-BrW]CRLII{Amide} |
| 1297 | Pra-[Nle6;Glu11;5-BrW24]JzTx-V(1-29) | {H}-[Pra]YCQKW[Nle]W |
| | | TCDEKRACCEGLRCKL |
| | | [5-BrW]CRKII{Amide} |
| 1298 | Pra-[Nle6;Glu12;5-BrW24]JzTx-V(1-29) | {H}-[Pra]YCQKW[Nle]W |
| | | TCDSERACCEGLRCKL |
| | | [5-BrW]CRKII{Amide} |
| 1299 | Pra-[Nle6;Glu14;5-BrW24]JzTx-V(1-29) | {H}-[Pra]YCQKW[Nle]W |
| | | TCDSKRECCEGLRCKL |
| | | [5-BrW]CRKII{Amide} |
| 1300 | Pra-[Nle6;Ala12;5-BrW24]JzTx-V(1-29) | {H}-[Pra]YCQKW[Nle]W |
| | | TCDSARACCEGLRCKL |
| | | [5-BrW]CRKII{Amide} |
| 1301 | Pra-[Nle6;Asp18;5-BrW24]JzTx-V(1-29) | {H}-[Pra]YCQKW[Nle]W |
| | | TCDSKRACCEDLRCKL |
| | | [5-BrW]CRKII{Amide} |
| 1302 | Pra-[Nle6;Val20;5-BrW24]JzTx-V(1-29) | {H}-[Pra]YCQKW[Nle]W |
| | | TCDSKRACCEGLVCKL |
| | | [5-BrW]CRKII{Amide} |
| 1303 | Pra-[Nle6;Gln22;5-BrW24]JzTx-V(1-29) | {H}-[Pra]YCQKW[Nle]W |
| | | TCDSKRACCEGLRCQL |
| | | [5-BrW]CRKII{Amide} |
| 1304 | Pra-[Nle6;5-BrW24;Tyr27]JzTx-V(1-29) | {H}-[Pra]YCQKW[Nle]W |
| | | TCDSKRACCEGLRCKL |
| | | [5-BrW]CRYII{Amide} |
| 1305 | Pra-[Nle6;5-BrW24;Leu27]JzTx-V(1-29) | {H}-[Pra]YCQKW[Nle]W |
| | | TCDSKRACCEGLRCKL |
| | | [5-BrW]CRLII{Amide} |
| 1306 | Pra-[Glu1;Nle6;Ala12;5-BrW24] | {H}-[Pra]ECQKW[Nle]W |
| | JzTx-V(1-29) | TCDSARACCEGLRCKL |
| | | [5-BrW]CRKII{Amide} |
| 1307 | Pra-[Glu1;Nle6;Asp18;5-BrW24] | {H}-[Pra]ECQKW[Nle]W |
| | JzTx-V(1-29) | TCDSKRACCEDLRCKL |
| | | [5-BrW]CRKII{Amide} |
| 1308 | Pra-[Glu1;Nle6;Val20;5-BrW24] | {H}-[Pra]ECQKW[Nle]W |
| | JzTx-V(1-29) | TCDSKRACCEGLVCKL |
| | | [5-BrW]CRKII{Amide} |
| 1309 | Pra-[Glu1;Nle6;Gln22;5-BrW24] | {H}-[Pra]ECQKW[Nle]W |
| | JzTx-V(1-29) | TCDSKRACCEGLRCQL |
| | | [5-BrW]CRKII{Amide} |
| 1310 | Pra-[Glu1;Nle6;5-BrW24;Tyr27] | {H}-[Pra]ECQKW[Nle]W |
| | JzTx-V(1 -29) | TCDSKRACCEGLRCKL |
| | | [5-BrW]CRYII{Amide} |
| 1311 | Pra-[Glu1;Nle6;5-BrW24;Leu27] | {H}-[Pra]ECQKW[Nle]W |
| | JzTx-V(1 -29) | TCDSKRACCEGLRCKL |
| | | [5-BrW]CRLII{Amide} |
| 1312 | Pra-[Nle6;Glu11;Ala12;5-BrW24] | {H}-[Pra]YCQKW[Nle]W |
| | JzTx-V(1-29) | TCDEARACCEGLRCKL |
| | | [5-BrW]CRKII{Amide} |
| 1313 | Pra-[Nle6;Glu11;Asp18;5-BrW24] | {H}-[Pra]YCQKW[Nle]W |
| | JzTx-V(1-29) | TCDEKRACCEDLRCKL |
| | | [5-BrW]CRKII{Amide} |
| 1314 | Pra-[Nle6;Hlu11;Val20;5-BrW24] | {H}-[Pra]YCQKW[Nle]W |
| | JzTx-V(1-29) | TCDEKRACCEGLVCKL |
| | | [5-BrW]CRKII{Amide} |
| 1315 | Pra-[Nle6;Glu11;Gln22;5-BrW24] | {H}-[Pra]YCQKW[Nle]W |
| | JzTx-V(1-29) | TCDEKRACCEGLRCQL |
| | | [5-BrW]CRKII{Amide} |
| 1316 | Pra-[Nle6;Glu11;5-BrW24;Tyr27] | {H}-[Pra]YWCQKW[Nle]W |
| | JzTx-V(1-29) | TCDEKRACCEGLRCKL |
| | | [5-BrW]CRYII{Amide} |
| 1317 | Pra-[Nle6;Glu11;5-BrW24;Leu27] | {H}-[Pra]YCQKW[Nle]W |
| | JzTx-V(1-29) | TCDEKRACCEGLRCKL |
| | | [5-BrW]CRLII{Amide} |
| 1318 | Pra-[Nle6;Glu12;Asp18;5-BrW24] | {H}-[Pra]YCQKW[Nle]W |
| | JzTx-V(1-29) | TCDSERACCEDLRCKL |
| | | [5-BrW]CRKII{Amide} |
| 1319 | Pra-[Nle6;Glu12;Val20;5-BrW24] | {H}-[Pra]YCQKW[Nle]W |
| | JzTx-V(1-29) | TCDSERACCEGLVCKL |
| | | [5-BrW]CRKII{Amide} |
| 1320 | Pra-[Nle6;Glu12;Gln22;5-BrW24] | {H}-[Pra]YCQKW[Nle]W |
| | JzTx-V(1-29) | TCDSERACCEGLRCQL |
| | | [5-BrW]CRKII{Amide} |
| 1321 | Pra-[Nle6;Glu12;5-BrW24;Tyr27] | {H}-[Pra]YCQKW[Nle]W |
| | JzTx-V(1-29) | TCDSERACCEGLRCKL |
| | | [5-BrW]CRYII{Amide} |
| 1322 | Pra-[Nle6;Glu12;5-BrW24;Leu27] | {H}-[Pra]YCQKW[Nle]W |
| | JzTx-V(1-29) | TCDSERACCEGLRCKL |
| | | [5-BrW]CRLII{Amide} |
| 1323 | Pra-[Nle6;Ala12;Glu13;5-BrW24] | {H}-[Pra]YCQKW[Nle]W |
| | JzTx-V(1-29) | TCDSAEACCEGLRCKL |
| | | [5-BrW]CRKII{Amide} |
| 1324 | Pra-[Nle6;Glu13;Asp18;5-BrW24] | {H}-[Pra]YCQKW[Nle]W |
| | JzTx-V(1-29) | TCDSKEACCEDLRCKL |
| | | [5-BrW]CRKII{Amide} |
| 1325 | Pra-]Nle6;Glu13;Val20;5-BrW24] | {H}-[Pra]YCQKW[Nle]W |
| | JzTx-V(1-29) | TCDSKEACCEGLVCKL |
| | | [5-BrW]CRKII{Amide} |
| 1326 | Pra-[Nle6;Glu13;Gln22;5-BrW24] | {H}-[Pra]YCQKW[Nle]W |
| | JzTx-V(1-29) | TCDSKEACCEGLRCQL |
| | | [5-BrW]CRKII{Amide} |
| 1327 | Pra-[Nle6;Glu13;5-BrW24;Tyr27] | {H}-[Pra]YCQKW[Nle]W |
| | JzTx-V(1-29) | TCDSKEACCEGLRCKL |
| | | [5-BrW]CRYII{Amide} |
| 1328 | Pra-[Nle6;Glu13;5-BrW24;Leu27] | {H}-[Pra]YCQKW[Nle]W |
| | JzTx-V(1-29) | TCDSKEACCEGLRCKL |
| | | [5-BrW]CRLII{Amide} |
| 1329 | Pra-[Nle6;Ala12;Val20;5-BrW24] | {H}-[Pra]YCQKW[Nle]W |
| | JzTx-V(1-29) | TCDSARACCEGLVCKL |
| | | [5-BrW]CRKII{Amide} |
| 1330 | Pra-[Nle6;Asp18;Val20;5-BrW24] | {H}-[Pra]YCQKW[Nle]W |
| | JzTx-V(1-29) | TCDSKRACCEDLVCKL |
| | | [5-BrW]CRKII{Amide} |
| 1331 | Pra-[Nle6;Val20;Gln22;5-BrW24] | {H}-[Pra]YCQKW[Nle]W |
| | JzTx-V(1-29) | TCDSKRACCEGLVCQL |
| | | [5-BrW]CRKII{Amide} |
| 1332 | Pra-[Nle6;Val20;5-BrW24;Tyr27] | {H}-[Pra]YCQKW[Nle]W |
| | JzTx-V(1-29) | TCDSKRACCEGLVCKL |
| | | [5-BrW]CRYII{Amide} |
| 1333 | Pra-[Nle6;Val20;5-BrW24;Leu27] | {H}-[Pra]YCQKW[Nle]W |
| | JzTx-V(1-29) | TCDSKRACCEGLVCKL |
| | | [5-BrW]CRLII{Amide} |
| 1334 | Pra-[Nle6;Glu11,12;5-BrW24] | {H}-[Pra]YCQKW[Nle]W |
| | JzTx-V(1-29) | TCDEERACCEGLRCKL |
| | | [5-BrW]CRKII{Amide} |
| 1335 | Pra-[Nle6;Glu11,12;Asp18;5-BrW24] | {H}-[Pra]YCQKW[Nle]W |
| | JzTx-V(1-29) | TCDEERACCEDLRCKL |
| | | [5-BrW]CRKII{Amide} |
| 1336 | Pra-[Nle6;Glu11,12;Val20;5-BrW24] | {H}-[Pra]YCQKW[Nle]W |
| | JzTx-V(1-29) | TCDEERACCEGLVCKL |
| | | [5-BrW]CRKII{Amide} |
| 1337 | Pra-[Nle6;Glu11,12;Gln22;5-BrW24] | {H}-[Pra]YCQKW[Nle]W |
| | JzTx-V(1-29) | TCDEERACCEGLRCQL |
| | | [5-BrW]CRKII{Amide} |
| 1338 | Pra-[Nle6;Glu11,12;5-BrW24;Tyr27] | {H}-[Pra]YCQKW[Nle]W |
| | JzTx-V(1 -29) | TCDEERACCEGLRCKL |
| | | [5-BrW]CRYII{Amide} |
| 1339 | Pra-[Nle6;Glu11,12;5-BrW24;Leu27] | {H}-[Pra]YCQKW[Nle]W |
| | JzTx-V(1-29) | TCDEERACCEGLRCKL |
| | | [5-BrW]CRLII{Amide} |
| 1340 | Pra-[Nle6;Glu11,12;Val20;Gln22; | {H}-[Pra]YCQKW[Nle]W |
| | 5-BrW24]JzTx-V(1-29) | TCDEERACCEGLVCQL |
| | | [5-BrW]CRKII{Amide} |
| 1341 | Pra-[Nle6;Glu11,12;Val20;5-BrW24; | {H}-[Pra]YCQKW[Nle]W |
| | Tyr27]JzTx-V(1-29) | TCDEERACCEGLVCKL |
| | | [5-BrW]CRYII{Amide} |
| 1342 | Pra-[Nle6;Glu11,12;Val20;5-BrW24; | {H}-[Pra]YCQKW[Nle]W |
| | Leu27]JzTx-V(1 -29) | TCDEERACCEGLVCKL |
| | | [5-BrW]CRLII{Amide} |
| 1343 | Pra-[Nle6;Glu12,18;Val20;5-BrW24] | {H}-[Pra]YCQKW[Nle]W |
| | JzTx-V(1-29) | TCDSERACCEELVCKL |
| | | [5-BrW]CRKII{Amide} |
| 1344 | Pra-[Nle6;Glu12,18;Gln22;5-BrW24] | {H}-[Pra]YCQKW[Nle]W |
| | JzTx-V(1-29) | TCDSERACCEELRCQL |
| | | [5-BrW]CRKII{Amide} |
| 1345 | Pra-[Nle6;Glu12,18;5-BrW24;Tyr27] | {H}-[Pra]YCQKW[Nle]W |
| | JzTx-V(1 -29) | TCDSERACCEELRCKL |
| | | [5-BrW]CRYII{Amide} |
| 1346 | Pra-[Nle6;Glu12,18;5-BrW24;Leu27] | {H}-[Pra]YCQKW[Nle]W |
| | JzTx-V(1-29) | TCDSERACCEELRCKL |
| | | [5-BrW]CRLII{Amide} |
| 1347 | Pra-[Nle6;Glu12,18;Val20;Gln22; | {H}-[Pra]YCQKW[Nle]W |
| | 5-BrW24]JzTx-V(1 -29) | TCDSERACCEELVCQL |
| | | [5-BrW]CRKII{Amide} |
| 1348 | Pra-[Nle6;Glu12,18;Val20;5-BrW24; | {H}-[Pra]YCQKW[Nle]W |
| | Tyr27]JzTx-V(1-29) | TCDSERACCEELVCKL |
| | | [5-BrW]CRYII{Amide} |
| 1349 | Pra-[Nle6;Glu12,18;Val20;5-BrW24; | {H}-[Pra]YCQKW[Nle]W |
| | Leu27]JzTx-V(1 -29) | TCDSERACCEELVCKL |
| | | [5-BrW]CRLII{Amide} |
| 1350 | CyA-[Glu1,28;Nle6;Pra17;5-BrW24] | {H}-[CyA]ECQKW[Nle]W |
| | JzTx-V(1-29) | TCDSKRACC[Pra]GLRCKL |
| | | [5-BrW]CRKEI{Amide} |
| 1351 | CyA-[Nle6;Glu12,18,28;Pra17; | {H}-[CyA]YCQKW[Nle]W |
| | 5-BrW24]JzTx-V(1-29) | TCDSERACC[Pra]ELRCKL |
| | | [5-BrW]CRKEI{Amide} |
| 1352 | Pra-[Glu1,28;Nle6;5-BrW24] | {H}-[Pra]ECQKW[Nle]W |
| | JzTx-V(1-29) | TCDSKRACCEGLRCKL |
| | | [5-BrW]CRKEI{Amide} |
| 1353 | Pra-[Nle6;Glu12,18,28;5-BrW24] | {H}-[Pra]YCQKW[Nle]W |
| | JzTx-V(1-29) | TCDSERACCEELRCKL |
| | | [5-BrW]CRKEI{Amide} |
| 1354 | CyA-[Glu1;Nle6;Pra17;5-BrW24] | {H}-[CyA]ECQKW[Nle]W |
| | JzTx-V(1-29) | TCDSKRACC[Pra]GLRCKL |
| | | [5-BrW]CRKII{Amide} |
| 1355 | CyA-[Nle6;Glu12,18;Pra17;5-BrW24] | {H}-[CyA]YCQKW[Nle]W |
| | JzTx-V(1-29) | TCDSERACC[Pra]ELRCKL |
| | | [5-BrW]CRKII{Amide} |
| 1356 | Pra-[Glu1;Nle6;5-BrW24]JzTx-V(1-29) | {H}-[Pra]ECQKW[Nle]W |
| | | TCDSKRACCEGLRCKL |
| | | [5-BrW]CRKII{Amide} |
| 1357 | Pra-[Nle6;Glu12,18;5-BrW24] | {H}-[Pra]YCQKW[Nle]W |
| | JzTx-V(1-29) | TCDSERACCEELRCKL |
| | | [5-BrW]CRKII{Amide} |
| 1358 | CyA-[Glu1,28;hPhe5;Nle6;Pra17; | {H}-[CyA]ECQK[hPhe] |
| | 5-BrW24]JzTx-V(1-29) | [Nle]WTCDSKRACC[Pra] |
| | | GLRCKL[5-BrW]CRKEI |
| | | {Amide} |
| 1359 | CyA-[hPhe5;Nle6;Glu11;28;Pra17; | {H}-[CyA]YCQK[hPhe] |
| | 5-BrW24]JzTx-V(1 -29) | [Nle]WTCDEKRACC[Pra] |
| | | GLRCKL[5-BrW]CRKEI |
| | | {Amide} |
| 1360 | CyA-[hPhe5;Nle6;Glu12,28;Pra17; | {H}-[CyA]YCQK[hPhe] |
| | 5-BrW24]JzTx-V(1 -29) | [Nle]WTCDSERACC[Pra] |
| | | GLRCKL[5-BrW]CRKEI |
| | | {Amide} |
| 1361 | CyA-[hPhe5;Nle6;Glu14,28;Pra17; | {H}-[CyA]YCQK[hPhe] |
| | 5-BrW24]JzTx-V(1 -29) | [Nle]WTCDSKRECC[Pra] |
| | | GLRCKL[5-BrW]CRKEI |
| | | {Amide} |
| 1362 | CyA-[hPhe5;Nle6;Glu11,12,28;Pra17; | {H}-[CyA]YCQK[hPhe] |
| | 5-BrW24]JzTx-V(1-29) | [Nle]WTCDEERACC[Pra] |
| | | GLRCKL[5-BrW]CRKEI |
| | | {Amide} |
| 1363 | CyA-[hPhe5;Nle6;Glu12,18,28;Pra17; | {H}-[CyA]YCQK[hPhe] |
| | 5-BrW24]JzTx-V(1 -29) | [Nle]WTCDSERACC[Pra] |
| | | ELRCKL[5-BrW]CRKEI |
| | | {Amide} |
| 1364 | Pra-[Glu1,28;hPhe5;Nle6;5-BrW24] | {H}-[Pra]ECQK[hPhe] |
| | JzTx-V(1-29) | [Nle]WTCDSKRACCEGLRC |
| | | KL[5-BrW]CRKEI{Amide} |
| 1365 | Pra-[hPhe5;Nle6;Glu11,28;5-BrW24] | {H}-[Pra]YCQK[hPhe] |
| | JzTx-V(1-29) | [Nle]WTCDEKRACCEGLRC |
| | | KL[5-BrW]CRKEI{Amide} |
| 1366 | Pra-[hPhe5;Nle6;Glu12,28;5-BrW24] | {H}-[Pra]YCQK[hPhe] |
| | JzTx-V(1-29) | [Nle]WTCDSERACCEGLRC |
| | | KL[5-BrW]CRKEI{Amide} |
| 1367 | Pra-[hPhe5;Nle6;Glu14,28;5-BrW24] | {H}-[Pra]YCQK[hPhe] |
| | JzTx-V(1-29) | [Nle]WTCDSKRECCEGLRC |
| | | KL[5-BrW]CRKEI{Amide} |
| 1368 | Pra-[hPhe5;Nle6;Glu11,12,28; | {H}-[Pra]YCQK[hPhe] |
| | 5-BrW24]JzTx-V(1-29) | [Nle]WTCDEERACCEGLRC |
| | | KL[5-BrW]CRKEI{Amide} |
| 1369 | Pra-[hPhe5;Nle6;Glu12,18,28; | {H}-[Pra]YCQK[hPhe] |
| | 5-BrW24]JzTx-V(1-29) | [Nle]WTCDSERACCEELRC |
| | | KL[5-BrW]CRKEI{Amide} |
| 1370 | CyA-[Glu1;hPhe5;Nle6;Pra17; | {H}-[CyA]ECQK[hPhe] |
| | 5-BrW24]JzTx-V(1-29) | [Nle]WTCDSKRACC[Pra] |
| | | GLRCKL[5-BrW]CRKII |
| | | {Amide} |
| 1371 | CyA-[hPhe5;Nle6;Glu11;Pra17; | {H}-[CyA]YCQK[hPhe] |
| | 5-BrW24]JzTx-V(1-29) | [Nle]WTCDEKRACC[Pra] |
| | | GLRCKL[5-BrW]CRKII |
| | | {Amide} |
| 1372 | CyA-[hPhe5;Nle6;Glu12;Pra17; | {H}-[CyA]YCQK[hPhe] |
| | 5-BrW24]JzTx-V(1-29) | [Nle]WTCDSERACC[Pra] |
| | | GLRCKL[5-BrW]CRKII |
| | | {Amide} |
| 1373 | CyA-[hPhe5;Nle6;Glu14;Pra17; | {H}-[CyA]YCQK[hPhe] |
| | 5-BrW24]JzTx-V(1-29) | [Nle]WTCDSKRECC[Pra] |
| | | GLRCKL[5-BrW]CRKII |
| | | {Amide} |
| 1374 | CyA-[hPhe5;Nle6;Glu11,12;Pra17; | {H}-[CyA]YCQK[hPhe] |
| | 5-BrW24]JzTx-V(1-29) | [Nle]WTCDEERACC[Pra] |
| | | GLRCKL[5-BrW]CRKII |
| | | {Amide} |
| 1375 | CyA-[hPhe5;Nle6;Glu12,18;Pra17; | {H}-[CyA]YCQK[hPhe] |
| | 5-BrW24]JzTx-V(1-29) | [Nle]WTCDSERACC[Pra] |
| | | ELRCKL[5-BrW]CRKII |
| | | {Amide} |
| 1376 | Pra-[Glu1;hPhe5;Nle6;5-BrW24] | {H}-[Pra]ECQK[hPhe] |
| | JzTx-V(1-29) | [Nle]WTCDSKRACCEGLRC |
| | | KL[5-BrW]CRKII{Amide} |
| 1377 | Pra-[hPhe5;Nle6;Glu11;5-BrW24] | {H}-[Pra]YCQK[hPhe] |
| | JzTx-V(1-29) | [Nle]WTCDEKRACCEGLRC |
| | | KL[5-BrW]CRKII{Amide} |
| 1378 | Pra-[hPhe5;Nle6;Glu12;5-BrW24] | {H}-[Pra]YCQK[hPhe] |
| | JzTx-V(1-29) | [Nle]WTCDSERACCEGLRC |
| | | KL[5-BrW]CRKII{Amide} |
| 1379 | Pra-[hPhe5;Nle6;Glu14;5-BrW24] | {H}-[Pra]YCQK[hPhe] |
| | JzTx-V(1-29) | [Nle]WTCDSKRECCEGLRC |
| | | KL[5-BrW]CRKII{Amide} |
| 1380 | Pra-[hPhe5;Nle6;Glu11,12;5-BrW24] | {H}-[Pra]YCQK[hPhe] |
| | JzTx-V(1-29) | [Nle]WTCDEERACCEGLRC |
| | | KL[5-BrW]CRKII{Amide} |
| 1381 | Pra-[hPhe5;Nle6;Glu12,18;5-BrW24] | {H}-[Pra]YCQK[hPhe] |
| | JzTx-V(1-29) | [Nle]WTCDSERACCEELRC |
| | | KL[5-BrW]CRKII{Amide} |
| 1382 | CyA-[Glu1,28;Nle6;Pra17;Chg23; | {H}-[CyA]ECQKW[Nle]W |
| | 5-BrW24]JzTx-V(1-29) | TCDSKRACC[Pra]GLRCK |
| | | [Chg][5-BrW]CRKEI |
| | | {Amide} |
| 1383 | CyA-[Nle6;Glu11,28;Pra17;Chg23; | {H}-[CyA]YCQKW[Nle]W |
| | 5-BrW24]JzTx-V(1-29) | TCDEKRACC[Pra]GLRCK |
| | | [Chg][5-BrW]CRKEI |
| | | {Amide} |
| 1384 | CyA-[Nle6;Glu12,28;Pra17;Chg23; | {H}-[CyA]YCQKW[Nle]W |
| | 5-BrW24]JzTx-V(1-29) | TCDSERACC[Pra]GLRCK |
| | | [Chg][5-BrW]CRKEI |
| | | {Amide} |
| 1385 | CyA-[Nle6;Glu14,28;Pra17;Chg23; | {H}-[CyA]YCQKW[Nle]W |
| | 5-BrW24]JzTx-V(1-29) | TCDSKRECC[Pra]GLRCK |
| | | [Chg][5-BrW]CRKEI |
| | | {Amide} |
| 1386 | CyA-[Nle6;Glu11,12,28;Pra17; | {H}-[CyA]YCQKW[Nle]W |
| | Chg23;5-BrW24]JzTx-V(1-29) | TCDEERACC[Pra]GLRCK |
| | | [Chg][5-BrW]CRKEI |
| | | {Amide} |
| 1387 | CyA-[Nle6;Glu12,18,28;Pra17; | {H}-[CyA]YCQKW[Nle]W |
| | Chg23;5-BrW24]JzTx-V(1-29) | TCDSERACC[Pra]ELRCK |
| | | [Chg][5-BrW]CRKEI |
| | | {Amide} |
| 1388 | Pra-[Glu1,28;Nle6;Chg23;5-BrW24] | {H}-[Pra]ECQKW[Nle]W |
| | JzTx-V(1-29) | TCDSKRACCEGLRCK[Chg] |
| | | [5-BrW]CRKEI{Amide} |
| 1389 | Pra-[Nle6;Glu11,28;Chg23;5-BrW24] | {H}-[Pra]YCQKW[Nle]W |
| | JzTx-V(1-29) | TCDEKRACCEGLRCK[Chg] |
| | | [5-BrW]CRKEI{Amide} |
| 1390 | Pra-[Nle6;Glu12,28;Chg23;5-BrW24] | {H}-[Pra]YCQKW[Nle]W |
| | JzTx-V(1-29) | TCDSERACCEGLRCK[Chg] |
| | | [5-BrW]CRKEI{Amide} |
| 1391 | Pra-[Nle6;Glu14,28;Chg23;5-BrW24] | {H}-[Pra]YCQKW[Nle]W |
| | JzTx-V(1-29) | TCDSKRECCEGLRCK[Chg] |
| | | [5-BrW]CRKEI{Amide} |
| 1392 | Pra-[Nle6;Glu11,12,28;Chg23; | {H}-[Pra]YCQKW[Nle]W |
| | 5-BrW24]JzTx-V(1-29) | TCDEERACCEGLRCK[Chg] |
| | | [5-BrW]CRKEI{Amide} |
| 1393 | Pra-[Nle6;Glu12,18,28;Chg23; | {H}-[Pra]YCQKW[Nle]W |
| | 5-BrW24]JzTx-V(1-29) | TCDSERACCEELRCK[Chg] |
| | | [5-BrW]CRKEI{Amide} |
| 1394 | CyA-[Glu1;Nle6;Pra17;Chg23; | {H}-[CyA]ECQKW[Nle]W |
| | 5-BrW24]JzTx-V(1-29) | TCDSKRACC[Pra]GLRCK |
| | | [Chg][5-BrW]CRKII |
| | | {Amide} |
| 1395 | CyA-[Nle6;Glu11;Pra17;Chg23; | {H}-[CyA]YCQKW[Nle]W |
| | 5-BrW24]JzTx-V(1-29) | TCDEKRACC[Pra]GLRCK |
| | | [Chg][5-BrW]CRKII |
| | | {Amide} |
| 1396 | CyA-[Nle6;Glu12;Pra17;Chg23; | {H}-[CyA]YCQKW[Nle]W |
| | 5-BrW24]JzTx-V(1-29) | TCDSERACC[Pra]GLRCK |
| | | [Chg][5-BrW]CRKII |
| | | {Amide} |
| 1397 | CyA-[Nle6;Glu14;Pra17;Chg23; | {H}-[CyA]YCQKW[Nle]W |
| | 5-BrW24]JzTx-V(1-29) | TCDSKRECC[Pra]GLRCK |
| | | [Chg][5-BrW]CRKII |
| | | {Amide} |
| 1398 | CyA-[Nle6;Glu11,12;Pra17;Chg23; | {H}-[CyA]YCQKW[Nle]W |
| | 5-BrW24]JzTx-V(1-29) | TCDEERACC[Pra]GLRCK |
| | | [Chg][5-BrW]CRKII |
| | | {Amide} |
| 1399 | CyA-[Nle6;Glu12,18;Pra17;Chg23; | {H}-[CyA]YCQKW[Nle]W |
| | 5-BrW24]JzTx-V(1-29) | TCDSERACC[Pra]ELRCK |
| | | [Chg][5-BrW]CRKII |
| | | {Amide} |
| 1400 | Pra-[Glu1;Nle6;Chg23;5-BrW24] | {H}-[Pra]ECQKW[Nle]W |
| | JzTx-V(1-29) | TCDSKRACCEGLRCK[Chg] |
| | | [5-BrW]CRKII{Amide} |
| 1401 | Pra-[Nle6;Glu11;Chg23;5-BrW24] | {H}-[Pra]YCQKW[Nle]W |
| | JzTx-V(1-29) | TCDEKRACCEGLRCK[Chg] |
| | | [5-BrW]CRKII{Amide} |
| 1402 | Pra-[Nle6;Glu12;Chg23;5-BrW24] | {H}-[Pra]YCQKW[Nle]W |
| | JzTx-V(1-29) | TCDSERACCEGLRCK[Chg] |
| | | [5-BrW]CRKII{Amide} |
| 1403 | Pra-[Nle6;Glu14;Chg23;5-BrW24] | {H}-[Pra]YCQKW[Nle]W |
| | JzTx-V(1-29) | TCDSKRECCEGLRCK[Chg] |
| | | [5-BrW]CRKII{Amide} |
| 1404 | Pra-[Nle6;Glu11,12;Chg23; | {H}-[Pra]YCQKW[Nle]W |
| | 5-BrW24]JzTx-V(1-29) | TCDEERACCEGLRCK[Chg] |
| | | [5-BrW]CRKII{Amide} |
| 1405 | Pra-[Nle6;Glu12,18;Chg23; | {H}-[Pra]YCQKW[Nle]W |
| | 5-BrW24]JzTx-V(1-29) | TCDSERACCEELRCK[Chg] |
| | | [5-BrW]CRKII{Amide} |
| 1406 | CyA-[Glu1,28;Nle6;Pra17;5-BrW24; | {H}-[CyA]ECQKW[Nle]W |
| | Phe29]JzTx-V(1-29) | TCDSKRACC[Pra]GLRCKL |
| | | [5-BrW]CRKEF{Amide} |
| 1407 | CyA-[Nle6;Glu11,28;Pra17;5-BrW24; | {H}-[CyA]YCQKW[Nle]W |
| | Phe29]JzTx-V(1-29) | TCDEKRACC[Pra]GLRCKL |
| | | [5-BrW]CRKEF{Amide} |
| 1408 | CyA-[Nle6;Glu12,28;Pra17;5-BrW24; | {H}-[CyA]YCQKW[Nle]W |
| | Phe29]JzTx-V(1-29) | TCDSERACC[Pra]GLRCKL |
| | | [5-BrW]CRKEF{Amide} |
| 1409 | CyA-[Nle6;Glu14,28;Pra17;5-BrW24; | {H}-[CyA]YCQKW[Nle]W |
| | Phe29]JzTx-V(1-29) | TCDSKRECC[Pra]GLRCKL |
| | | [5-BrW]CRKEF{Amide} |
| 1410 | CyA-[Nle6;Glu11,12,28;Pra17; | {H}-[CyA]YCQKW[Nle]W |
| | 5-BrW24;Phe29]JzTx-V(1-29) | TCDEERACC[Pra]GLRCKL |
| | | [5-BrW]CRKEF{Amide} |
| 1411 | CyA-[Nle6;Glu12,18,28;Pra17; | {H}-[CyA]YCQKW[Nle]W |
| | 5-BrW24;Phe29]JzTx-V(1-29) | TCDSERACC[Pra]ELRCKL |
| | | [5-BrW]CRKEF{Amide} |
| 1412 | Pra-[Glu1,28;Nle6;5-BrW24;Phe29] | {H}-[Pra]ECQKW[Nle]W |
| | JzTx-V(1-29) | TCDSKRACCEGLRCKL |
| | | [5-BrW]CRKEF{Amide} |
| 1413 | Pra-[Nle6;Glu11,28;5-BrW24;Phe29] | {H}-[Pra]YCQKW[Nle]W |
| | JzTx-V(1-29) | TCDEKRACCEGLRCKL |
| | | [5-BrW]CRKEF{Amide} |
| 1414 | Pra-[Nle6;Glu12,28;5-BrW24;Phe29] | {H}-[Pra]YCQKW[Nle]W |
| | JzTx-V(1-29) | TCDSERACCEGLRCKL |
| | | [5-BrW]CRKEF{Amide} |
| 1415 | Pra-[Nle6;Glu14,28;5-BrW24;Phe29] | {H}-[Pra]YCQKW[Nle]W |
| | JzTx-V(1-29) | TCDSKRECCEGLRCKL |
| | | [5-BrW]CRKEF{Amide} |
| 1416 | Pra-[Nle6;Glu11,12,28;5-BrW24;Phe29] | {H}-[Pra]YCQKW[Nle]W |
| | JzTx-V(1-29) | TCDEERACCEGLRCKL |
| | | [5-BrW]CRKEF{Amide} |
| 1417 | Pra-[Nle6;Glu12,18,28;5-BrW24;Phe29] | {H}-[Pra]YCQKW[Nle]W |
| | JzTx-V(1-29) | TCDSERACCEELRCKL |
| | | [5-BrW]CRKEF{Amide} |
| 1418 | CyA-[Glu1;Nle6;Pra17;5-BrW24;Phe29] | {H}-[CyA]ECQKW[Nle]W |
| | JzTx-V(1-29) | TCDSKRACC[Pra]GLRCKL |
| | | [5-BrW]CRKIF{Amide} |
| 1419 | CyA-[Nle6;Glu11;Pra17;5-BrW24; | {H}-[CyA]YCQKW[Nle]W |
| | Phe29]JzTx-V(1-29) | TCDEKRACC[Pra]GLRCKL |
| | | [5-BrW]CRKIF{Amide} |
| 1420 | CyA-[Nle6;Glu12;Pra17;5-BrW24; | {H}-[CyA]YCQKW[Nle]W |
| | Phe29]JzTx-V(1-29) | TCDSERACC[Pra]GLRCKL |
| | | [5-BrW]CRKIF{Amide} |
| 1421 | CyA-[Nle6;Glu14;Pra17;5-BrW24; | {H}-[CyA]YCQKW[Nle]W |
| | Phe29]JzTx-V(1-29) | TCDSKRECC[Pra]GLRCKL |
| | | [5-BrW]CRKIF{Amide} |
| 1422 | CyA-[Nle6;Glu11,12;Pra17;5-BrW24; | {H}-[CyA]YCQKW[Nle]W |
| | Phe29]JzTx-V(1-29) | TCDEERACC[Pra]GLRCKL |
| | | [5-BrW]CRKIF{Amide} |
| 1423 | CyA-[Nle6;Glu12,18;Pra17;5-BrW24; | {H}-[CyA]YCQKW[Nle]W |
| | Phe29]JzTx-V(1-29) | TCDSERACC[Pra]ELRCKL |
| | | [5-BrW]CRKIF{Amide} |
| 1424 | Pra-[Glu1;Nle6;5-BrW24;Phe29] | {H}-[Pra]ECQKW[Nle]W |
| | JzTx-V(1-29) | TCDSKRACCEGLRCKL |
| | | [5-BrW]CRKIF{Amide} |
| 1425 | Pra-[Nle6;Glu11;5-BrW24;Phe29] | {H}-[Pra]YCQKW[Nle]W |
| | JzTx-V(1-29) | TCDEKRACCEGLRCKL |
| | | [5-BrW]CRKIF{Amide} |
| 1426 | Pra-[Nle6;Glu12;5-BrW24;Phe29] | {H}-[Pra]YCQKW[Nle]W |
| | JzTx-V(1-29) | TCDSERACCEGLRCKL |
| | | [5-BrW]CRKIF{Amide} |
| 1427 | Pra-[Nle6;Glu14;5-BrW24;Phe29] | {H}-[Pra]YCQKW[Nle]W |
| | JzTx-V(1-29) | TCDSKRECCEGLRCKL |
| | | [5-BrW]CRKIF{Amide} |
| 1428 | Pra-[Nle6;Glu11,12;5-BrW24;Phe29] | {H}-[Pra]YCQKW[Nle]W |
| | JzTx-V(1-29) | TCDEERACCEGLRCKL |
| | | [5-BrW]CRKIF{Amide} |
| 1429 | Pra-[Nle6;Glu12,18;5-BrW24;Phe29] | {H}-[Pra]YCQKW[Nle]W |
| | JzTx-V(1-29) | TCDSERACCEELRCKL |
| | | [5-BrW]CRKIF{Amide} |
| 1430 | Pra-[Nle6;Glu14,28;Val20;5-BrW24] | {H}-[Pra]YCQKW[Nle]W |
| | JzTx-V(1-29) | TCDSKRECCEGLVCKL |
| | | [5-BrW]CRKEI{Amide} |
| 1431 | Pra-[Nle6;Glu14;Val20;5-BrW24] | {H}-[Pra]YCQKW[Nle]W |
| | JzTx-V(1-29) | TCDSKRECCEGLVCKL |
| | | [5-BrW]CRKII{Amide} |
| 1432 | CyA-[Glu1,28;hPhe5;Nle6;Pra17; | {H}-[Cya]ECQK[hPhe] |
| | Val20;5-BrW24]JzTx-V(1-29) | [Nle]WTCDSKRACC[Pra] |
| | | GLVCKL[5-BrW]CRKEI |
| | | {Amide} |
| 1433 | CyA-[hPhe5;Nle6;Glu11,28;Pra17; | {H}-[CyA]YCQK[hPhe] |
| | Val20;5-BrW24]JzTx-V(1-29) | [Nle]WTCDEKRACC[Pra] |
| | | GLVCKL[5-BrW]CRKEI |
| | | {Amide} |
| 1434 | Cya-[hPhe5;Nle6;Glu12,28;Pra17; | {H}-[CyA]YCQK[hPhe] |
| | Val20;5-BrW24]JzTx-V(1-29) | [Nle]WTCDSERACC[Pra] |
| | | GLVCKL[5-BrW]CRKEI |
| | | {Amide} |
| 1435 | CyA-[hPhe5;Nle6;Glu14,28;Pra17; | {H}-[CyA]YCQK[hPhe] |
| | Val20;5-BrW24]JzTx-V(1-29) | [Nle]WTCDSKRECC[Pra] |
| | | GLVCKL[5-BrW]CRKEI |
| | | {Amide} |
| 1436 | CyA-[hPhe5;Nle6;Glu11,12,28;Pra17; | {H}-[CyA]YCQK[hPhe] |
| | Val20;5-BrW24]JzTx-V(1-29) | [Nle]WTCDEERACC[Pra] |
| | | GLVCKL[5-BrW]CRKEI |
| | | {Amide} |
| 1437 | CyA-[hPhe5;Nle6;Glu12,18,28;Pra17; | {H}-[CyA]YCQK[hPhe] |
| | Val20;5-BrW24]JzTx-V(1-29) | [Nle]WTCDSERACC[Pra] |
| | | ELVCKL[5-BrW]CRKEI |
| | | {Amide} |
| 1438 | Pra-[Glu1,28;hPhe5;Nle6;Val20; | {H}-[Pra]ECQK[hPhe] |
| | 5-BrW24]JzTx-V(1-29) | [Nle]WTCDSKRACCEGLVC |
| | | KL[5-BrW]CRKEI{Amide} |
| 1439 | Pra-[hPhe5;Nle6;Glu11,28;Val20; | {H}-[Pra]YCQK[hPhe] |
| | 5-BrW24]JzTx-V(1-29) | [Nle]WTCDEKRACCEGLVC |
| | | KL[5-BrW]CRKEI{Amide} |
| 1440 | Pra-[hPhe5;Nle6;Glu12,28;Val20; | {H}-[Pra]YCQK[hPhe] |
| | 5-BrW24]JzTx-V(1-29) | [Nle]WTCDSERACCEGLVC |
| | | KL[5-BrW]CRKEI{Amide} |
| 1441 | Pra-[hPhe5;Nle6;Glu14,28;Val20; | {H}-[Pra]YCQK[hPhe] |
| | 5-BrW24]JzTx-V(1-29) | [Nle]WTCDSKRECCEGLVC |
| | | KL[5-BrW]CRKEI{Amide} |
| 1442 | Pra-[hPhe5;Nle6;Glu11,12,28; | {H}-[Pra]YCQK[hPhe] |
| | Val20;5-BrW24]JzTx-V(1-29) | [Nle]WTCDEERACCEGLVC |
| | | KL[5-BrW]CRKEI{Amide} |
| 1443 | Pra-[hPhe5;Nle6;Glu12,18,28; | {H}-[Pra]YCQK[hPhe] |
| | Val20;5-BrW24]JzTx-V(1-29) | [Nle]WTCDSERACCEELVC |
| | | KL[5-BrW]CRKEI{Amide} |
| 1444 | CyA-[Glu1;hPhe5;Nle6;Pra17; | {H}-[CyA]ECQK[hPhe] |
| | Val20;5-BrW24]JzTx-V(1-29) | [Nle]WTCDSKRACC[Pra] |
| | | GLVCKL[5-BrW]CRKII |
| | | {Amide} |
| 1445 | CyA-[hPhe5;Nle6;Glu11;Pra17; | {H}-[CyA]YCQK[hPhe] |
| | Val20;5-BrW24]JzTx-V(1-29) | [Nle]WTCDEKRACC[Pra] |
| | | GLVCKL[5-BrW]CRKII |
| | | {Amide} |
| 1446 | CyA-[hPhe5;Nle6;Glu12;Pra17; | {H}-[CyA]YCQK[hPhe] |
| | Val20;5-BrW24]JzTx-V(1 -29) | [Nle]WTCDSERACC[Pra] |
| | | GLVCKL[5-BrW]CRKII |
| | | {Amide} |
| 1447 | CyA-[hPhe5;Nle6;Glu14;Pra17; | {H}-[CyA]YCQK[hPhe] |
| | Val20;5-BrW24]JzTx-V(1-29) | [Nle]WTCDSKRECC[Pra] |
| | | GLVCKL[5-BrW]CRKII |
| | | {Amide} |
| 1448 | CyA-[hPhe5;Nle6;Glu11,12;Pra17; | {H}-[CyA]YCQK[hPhe] |
| | Val20;5-BrW24]JzTx-V(1-29) | [Nle]WTCDEERACC[Pra] |
| | | GLVCKL[5-BrW]CRKII |
| | | {Amide} |
| 1449 | CyA-[hphe5;Nle6;Glu12,18;Pra17; | {H}-[CyA]YCQK[hPhe] |
| | Val20;5-BrW24]JzTx-V(1-29) | [Nle]WTCDSERACC[Pra] |
| | | ELVCKL[5-BrW]CRKII |
| | | {Amide} |
| 1450 | Pra-[Glu1;hPhe5;Nle6;Val20; | {H}-[CyA]YCQK[hPhe] |
| | 5-BrW24]JzTx-V(1-29) | [Nle]WTCDSKRACCEGLVC |
| | | KL[5-BrW]CRKII{Amide} |
| 1451 | Pra-[hPhe5;Nle6;Glu11;Val20; | {H}-[Pra]YCQK[hPhe] |
| | 5-BrW24]JzTx-V(1-29) | [Nle]WTCDEKRACCEGLVC |
| | | KL[5-BrW]CRKII{Amide} |
| 1452 | Pra-[hPhe5;Nle6;Glu12;Val20; | {H}-[Pra]YCQK[hPhe] |
| | 5-BrW24]JzTx-V(1-29) | [Nle]WTCDSERACCEGLVC |
| | | KL[5-BrW]CRKII{Amide} |
| 1453 | Pra-[hPhe5;Nle6;Glu14;Val20; | {H}-[Pra]YCQK[hPhe] |
| | 5-BrW24]JzTx-V(1-29) | [Nle]WTCDSKRECCEGLVC |
| | | KL[5-BrW]CRKII{Amide} |
| 1454 | Pra-[hPhe5;Nle6;Glu11,12;Val20; | {H}-[Pra]YCQK[hPhe] |
| | 5-BrW24]JzTx-V(1-29) | [Nle]WTCDEERACCEGLVC |
| | | KL[5-BrW]CRKII{Amide} |
| 1455 | Pra-[hPhe5;Nle6;Hlu12,18;Val20; | {H}-[Pra]YCQK[hPhe] |
| | 5-BrW24]JzTx-V(1 -29) | [Nle]WTCDSERACCEELVC |
| | | KL[5-BrW]CRKII{Amide} |
| 1456 | CyA-[Glu1,28;Nle6;Pra17;Val20; | {H}-[CyA]ECQKW[Nle]W |
| | Chg23;5-BrW24]JzTx-V(1-29) | TCDSKRACC[Pra]GLVCK |
| | | [Chg][5-BrW]CRKEI |
| | | {Amide} |
| 1457 | CyA-[Nle6;Glu11,28;Pra17;Val20; | {H}-[CyA]ECQKW[Nle]W |
| | Chg23;5-BrW24]JzTx-V(1-29) | TCDSKRACC[Pra]GLVCK |
| | | [Chg][5-BrW]CRKEI |
| | | {Amide} |
| 1458 | CyA-[Nle6;Glu12,28;Pra17;Val20; | {H}-[CyA]YCQKW[Nle]W |
| | Chg23;5-BrW24]JzTx-V(1-29) | TCDSERACC[Pra]GLVCK |
| | | [Chg][5-BrW]CRKEI |
| | | {Amide} |
| 1459 | CyA-[Nle6;Glu14,28;Pra17;Val20; | {H}-[CyA]YCQKW[Nle]W |
| | Chg23;5-BrW24]JzTx-V(1-29) | TCDSKRECC[Pra]GLVCK |
| | | [Chg][5-BrW]CRKEI |
| | | {Amide} |
| 1460 | CyA-[Nle6;Glu11,12,28;Pra17;Val20; | {H}-[CyA]YCQKW[Nle]W |
| | Chg23;5-BrW24]JzTx-V(1-29) | TCDEERACC[Pra]GLVCK |
| | | [Chg][5-BrW]CRKEI |
| | | {Amide} |
| 1461 | CyA-[Nle6;Glu12,18,28;Pra17;Val20; | {H}-[CyA]YCQKW[Nle]W |
| | Chg23;5-BrW24]JzTx-V(1-29) | TCDSERACC[Pra]ELVCK |
| | | [Chg][5-BrW]CRKEI |
| | | {Amide} |
| 1462 | Pra-[Glu1,28;Nle6;Val20;Chg23; | {H}-[Pra]ECQKW[Nle]W |
| | 5-BrW24]JzTx-V(1-29) | TCDSKRACCEGLVCK[Chg] |
| | | [5-BrW]CRKEI{Amide} |
| 1463 | Pra-[Nle6;Glu11,28;Val20;Chg23; | {H}-[Pra]YCQKW[Nle]W |
| | 5-BrW24]JzTx-V(1-29) | TCDEKRACCEGLVCK[Chg] |
| | | [5-BrW]CRKEI{Amide} |
| 1464 | Pra-[Nle6;Glu12,28;Val20;Chg23; | {H}-[Pra]YCQKW[Nle]W |
| | 5-BrW24]JzTx-V(1-29) | TCDSERACCEGLVCK[Chg] |
| | | [5-BrW]CRKEI{Amide} |
| 1465 | Pra-[Nle6;Glu14,28;Val20;Chg23; | {H}-[Pra]YCQKW[Nle]W |
| | 5-BrW24]JzTx-V(1-29) | TCDSKRECCEGLVCK[Chg] |
| | | [5-BrW]CRKEI{Amide} |
| 1466 | Pra-[Nle6;Glu11,12,28;Val20; | {H}-[Pra]YCQKW[Nle]W |
| | Chg23;5-BrW24]JzTx-V(1-29) | TCDEERACCEGLVCK[Chg] |
| | | [5-BrW]CRKEI{Amide} |
| 1467 | Pra-[Nle6;Glu12,18,28;Val20; | {H}-[Pra]YCQKW[Nle]W |
| | Chg23;5-BrW24]JzTx-V(1-29) | TCDSERACCEELVCK[Chg] |
| | | [5-BrW]CRKEI{Amide} |
| 1468 | CyA-[Glu1;Nle6;Pra17;Val20; | {H}-[CyA]ECQKW[Nle]W |
| | Chg23;5-BrW24]JzTx-V(1-29) | TCDSKRACC[Pra]GLVCK |
| | | [Chg][5-BrW]CRKII |
| | | {Amide} |
| 1469 | CyA-[Nle6;Glu11;Pra17;Val20; | {H}-[CyA]YCQKW[Nle]W |
| | Chg23;5-BrW24]JzTx-V(1-29) | TCDEKRACC[Pra]GLVCK |
| | | [Chg][5-BrW]CRKII |
| | | {Amide} |
| 1470 | CyA-[Nle6;Glu12;Pra17;Val20; | {H}-[CyA]YCQKW[Nle]W |
| | Chg23;5-BrW24]JzTx-V(1-29) | TCDSERACC[Pra]GLVCK |
| | | [Chg][5-BrW]CRKII |
| | | {Amide} |
| 1471 | CyA-[Nle6;Glu14;Pra17;Val20; | {H}-[CyA]YCQKW[Nle]W |
| | Chg23;5-BrW24]JzTx-V(1-29) | TCDSKRECC[Pra]GLVCK |
| | | [Chg][5-BrW]CRKII |
| | | {Amide} |
| 1472 | CyA-[Nle6;Glu11,12;Pra17;Val20; | {H}-[CyA]YCQKW[Nle]W |
| | Chg23;5-BrW24]JzTx-V(1-29) | TCDEERACC[Pra]GLVCK |
| | | [Chg][5-BrW]CRKII |
| | | {Amide} |
| 1473 | CyA-[Nle6;Glu12,18;Pra17;Val20; | {H}-[CyA]YCQKW[Nle]W |
| | Chg23;5-BrW24]JzTx-V(1-29) | TCDSERACC[Pra]ELVCK |
| | | [Chg][5-BrW]CRKII |
| | | {Amide} |
| 1474 | Pra-[Glu1;Nle6;Val20;Chg23; | {H}-[Pra]ECQKW[Nle]W |
| | 5-BrW24]JzTx-V(1-29) | TCDSKRACCEGLVCK[Chg] |
| | | [5-BrW]CRKII{Amide} |
| 1475 | Pra-[Nle6;Glu11;Val20;Chg23; | {H}-[Pra]YCQKW[Nle]W |
| | 5-BrW24]JzTx-V(1-29) | TCDEKRACCEGLVCK[Chg] |
| | | [5-BrW]CRKII{Amide} |
| 1476 | Pra-[Nle6;Glu12;Val20;Chg23; | {H}-[Pra]YCQKW[Nle]W |
| | 5-BrW24]JzTx-V(1-29) | TCDSERACCEGLVCK[Chg] |
| | | [5-BrW]CRKII{Amide} |
| 1477 | Pra-[Nle6;Glu14;Val20;Chg23; | {H}-[Pra]YCQKW[Nle]W |
| | 5-BrW24]JzTx-V(1-29) | TCDSKRECCEGLVCK[Chg] |
| | | [5-BrW]CRKII{Amide} |
| 1478 | Pra-[Nle6;Glu11,12;Val20;Chg23; | {H}-[Pra]YCQKW[Nle]W |
| | 5-BrW24]JzTx-V(1-29) | TCDEERACCEGLVCK[Chg] |
| | | [5-BrW]CRKII{Amide} |
| 1479 | Pra-[Nle6;Glu12,18;Val20;Chg23; | {H}-[Pra]YCQKW[Nle]W |
| | 5-BrW24]JzTx-V(1-29) | TCDSERACCEELVCK[Chg] |
| | | [5-BrW]CRKII{Amide} |
| 1480 | CyA-[Glu1,28;Nle6;Pra17;Val20; | {H}-[CyA]ECQKW[Nle]W |
| | 5-BrW24;Phe29]JzTx-V(1-29) | TCDSKRACC[Pra]GLVCKL |
| | | [5-BrW]CRKEF{Amide} |
| 1481 | CyA-[Nle6;Glu11,28;Pra17;Val20; | {H}-[CyA]YCQKW[Nle]W |
| | 5-BrW24;Phe29]JzTx-V(1-29) | TCDEKRACC[Pra]GLVCKL |
| | | [5-BrW]CRKEF{Amide} |
| 1482 | CyA-[Nle6;Glu12,28;Pra17;Val20; | {H}-[CyA]YCQKW[Nle]W |
| | 5-BrW24;Phe29]JzTx-V(1-29) | TCDSERACC[Pra]GLVCKL |
| | | [5-BrW]CRKEF{Amide} |
| 1483 | CyA-[Nle6;Glu14,28;Pra17;Val20; | {H}-[CyA]YCQKW[Nle]W |
| | 5-BrW24;Phe29]JzTx-V(1-29) | TCDSKRECC[Pra]GLVCKL |
| | | [5-BrW]CRKEF{Amide} |
| 1484 | CyA-[Nle6;Glu11,12,28;Pra17;Val20; | {H}-[CyA]YCQKW[Nle]W |
| | 5-BrW24;Phe29]JzTx-V(1-29) | TCDEERACC[Pra]GLVCKL |
| | | [5-BrW]CRKEF{Amide} |
| 1485 | CyA-[Nle6;Glu12,18,28;Pra17;Val20; | {H}-[CyA]YCQKW[Nle]W |
| | 5-BrW24;Phe29]JzTx-V(1-29) | TCDSERACC[Pra]ELVCKL |
| | | [5-BrW]CRKEF{Amide} |
| 1486 | Pra-[Glu1,28;Nle6;Val20;5-BrW24; | {H}-[Pra]ECQKW[Nle]W |
| | Phe29]JzTx-V(1-29) | TCDSKRACCEGLVCKL |
| | | [5-BrW]CRKEF{Amide} |
| 1487 | Pra-[Nle6;Glu11,28;Val20;5-BrW24; | {H}-[Pra]YCQKW[Nle]W |
| | Phe29]JzTx-V(1-29) | TCDEKRACCEGLVCKL |
| | | [5-BrW]CRKEF{Amide} |
| 1488 | Pra-[Nle6;Glu12,28;Val20;5-BrW24; | {H}-[Pra]YCQKW[Nle]W |
| | Phe29]JzTx-V(1-29) | TCDSERACCEGLVCKL |
| | | [5-BrW]CRKEF{Amide} |
| 1489 | Pra-[Nle6;Glu14,28;Val20;5-BrW24; | {H}-[Pra]YCQKW[Nle]W |
| | Phe29]JzTx-V(1-29) | TCDSKRECCEGLVCKL |
| | | [5-BrW]CRKEF{Amide} |
| 1490 | Pra-[Nle6;Glu11,12,28;Val20; | {H}-[Pra]YCQKW[Nle]W |
| | 5-BrW24;Phe29]JzTx-V(1-29) | TCDEERACCEGLVCKL |
| | | [5-BrW]CRKEF{Amide} |
| 1491 | Pra-[Nle6;Glu12,18,28;Val20; | {H}-[Pra]YCQKW[Nle]W |
| | 5-BrW24;Phe29]JzTx-V(1-29) | TCDSERACCEELVCKL |
| | | [5-BrW]CRKEF{Amide} |
| 1492 | CyA-[Glu1;Nle6;Pra17;Val20; | {H}-[CyA]ECQKW[Nle]W |
| | 5-BrW24;Phe29]JzTx-V(1-29) | TCDSKRACC[Pra]GLVCKL |
| | | [5-BrW]CRKIF{Amide} |
| 1493 | CyA-[Nle6;Glu11;Pra17;Val20; | {H}-[CyA]YCQKW[Nle]W |
| | 5-BrW24;Phe29]JzTx-V(1-29) | TCDEKRACC[Pra]GLVCKL |
| | | [5-BrW]CRKIF{Amide} |
| 1494 | CyA-[Nle6;Glu12;Pra17;Val20; | {H}-[CyA]YCQKW[Nle]W |
| | 5-BrW24;Phe29]JzTx-V(1-29) | TCDSERACC[Pra]GLVCKL |
| | | [5-BrW]CRKIF{Amide} |
| 1495 | CyA-+N1e6;Glu14;Pral 7;Va120; | {H}-[CyA]YCQKW[Nle]W |
| | 5-BrW24;Phe29+JzTx-V(1-29) | TCDSKRECC[Pra]GLVCKL |
| | | [5-BrW]CRKIF{Amide} |
| 1496 | CyA-[Nle6;Glu11,12;Pra17;Val20; | {H}-[CyA]YCQKW[Nle]W |
| | 5-BrW24;Phe29]JzTx-V(1-29) | TCDEERACC[Pra]GLVCKL |
| | | [5-BrW]CRKIF{Amide} |
| 1497 | CyA-[Nle6;Glu12,18;Pra17;Val20; | {H}-[CyA]YCQKW[Nle]W |
| | 5-BrW24;Phe29]JzTx-V(1-29) | TCDSERACC[Pra]ELVCKL |
| | | [5-BrW]CRKIF{Amide} |
| 1498 | Pra-[Glu1;Nle6;Val20;5-BrW24; | {H}-[Pra]ECQKW[Nle]W |
| | Phe29]JzTx-V(1-29) | TCDSKRACCEGLVCKL |
| | | [5-BrW]CRKIF{Amide} |
| 1499 | Pra-[Nle6;Glu11;Val20;5-BrW24; | {H}-[Pra]YCQKW[Nle]W |
| | Phe29]JzTx-V(1-29) | TCDEKRACCEGLVCKL |
| | | [5-BrW]CRKIF{Amide} |
| 1500 | Pra-[Nle6;Glu12;Val20;5-BrW24; | {H}-[Pra]YCQKW[Nle]W |
| | Phe29]JzTx-V(1-29) | TCDSERACCEGLVCKL |
| | | [5-BrW]CRKIF{Amide} |
| 1501 | Pra-[Nle6;Glu14;Val20;5-BrW24; | {H}-[Pra]YCQKW[Nle]W |
| | Phe29]JzTx-V(1-29) | TCDSKRECCEGLVCKL |
| | | [5-BrW]CRKIF{Amide} |
| 1502 | Pra-[Nle6;Glu11,12;Val20;5-BrW24; | {H}-[Pra]YCQKW[Nle]W |
| | Phe29]JzTx-V(1-29) | TCDEERACCEGLVCKL |
| | | [5-BrW]CRKIF{Amide} |
| 1503 | Pra-[Nle6;Glu12,18;Val20;5-BrW24; | {H}-[Pra]YCQKW[Nle]W |
| | Phe29]JzTx-V(1-29) | TCDSERACCEELVCKL |
| | | [5-BrW]CRKIF{Amide} |
| 1504 | hPra-[Nle6]JzTx-V(1-29) | {H}-[Pra]YCQKW[Nle]W |
| | | TCDSKRACCEGLRCKLWCRK |
| | | II{Amide} |
| 1505 | CyA-[hPra1;Nle6]JzTx-V(1-29) | {H}-[CyA][hPra]CQKW |
| | | [Nle]WTCDSKRACCEGLRC |
| | | KLWCRKII{Amide} |
| 1506 | CyA-[Nle6;hPra11]JzTx-V(1-29) | {H}-[CyA]YCQKW[Nle]W |
| | | TCD[hPra]KRACCEGLRCK |
| | | LWCRKII{Amide} |
| 1507 | CyA-[Nle6;hPra12]JzTx-V(1-29) | {H}-[CyA]YCQKW[Nle]W |
| | | TCDS[hPra]RACCEGLRCK |
| | | LWCRKII{Amide} |
| 1508 | CyA-[Nle6;hPra14]JzTx-V(1-29) | {H}-[CyA]YCQKW[Nle]W |
| | | TCDSKR[hPra]CCEGLRCK |
| | | LWCRKII{Amide} |
| 1509 | CyA-[Nle6;hPra17]JzTx-V(1-29) | {H}-[CyA]YCQKW[Nle]W |
| | | TCDSKRACC[hPra]GLRCK |
| | | LWCRKII{Amide} |
| 1510 | hPra-[Nle6;Glu28]JzTx-V(1-29) | {H}-[hPra]YCQKW[Nle] |
| | | WTCDSKRACCEGLRCKLWCR |
| | | KEI{Amide} |
| 1511 | CyA-[hPra1;Nle6;Glu28]JzTx-V(1-29) | {H}-[CyA][hPra]CQKW |
| | | [Nle]WTCDSKRACCEGLRC |
| | | KLWCRKEI{Amide} |
| 1512 | CyA-+N1e6;hPral1;Glu28+JzTx-V(1-29) | {H}-[CyA]YCQKW[Nle]W |
| | | TCD[hPra]KRACCEGLRCK |
| | | LWCRKEI{Amide} |
| 1513 | CyA-[Nle6;hPra12;Glu28]JzTx-V(1-29) | {H}-[CyA]YCQKW[Nle]W |
| | | TCDS[hPra]RACCEGLRCK |
| | | LWCRKEI{Amide} |
| 1514 | CyA-[Nle6;hPra14;Glu28]JzTx-V(1-29) | {H}-[CyA]YCQKW[Nle]W |
| | | TCDSKR[hPra]CCEGLRCK |
| | | LWCRKEI{Amide} |
| 1515 | CyA-[Nle6;hPra17;Glu28]JzTx-V(1-29) | {H}-[CyA]YCQKW[Nle]W |
| | | TCDSKRACC[hPra]GLRCK |
| | | LWCRKEI{Amide} |
| 1516 | BhPra-+[Nle6]JzTx-V(1-29) | {H}-[BhPra]YCQKW |
| | | [Nle]WTCDSKRACCEGLRC |
| | | KLWCRKII{Amide} |
| 1517 | CyA-[BhPra1;Nle6]JzTx-V(1-29) | {H}-[CyA][BhPra]CQKW |
| | | [Nle]WTCDSKRACCEGLRC |
| | | KLWCRKII{Amide} |
| 1518 | CyA-[Nle6;BhPra11]JzTx-V(1-29) | {H}-[CyA]YCQKW[Nle]W |
| | | TCD[BhPra]KRACCEGLRC |
| | | KLWCRKII{Amide} |
| 1519 | CyA-[Nle6;BhPra12]JzTx-V(1-29) | {H}-[CyA]YCQKW[Nle]W |
| | | TCDS[BhPra]RACCEGLRC |
| | | KLWCRKII{Amide} |
| 1520 | CyA-[Nle6;BhPra14]JzTx-V(1-29) | {H}-[CyA]YCQKW[Nle]W |
| | | TCDSKR[BhPra]CCEGLRC |
| | | KLWCRKII{Amide} |
| 1521 | CyA-[Nle6;BhPra17]JzTx-V(1-29) | {H}-[CyA]YCQKW[Nle]W |
| | | TCDSKRACC[BhPra]GLRC |
| | | KLWCRKII{Amide} |
| 1522 | BhPra-[Nle6;Glu28]JzTx-V(1-29) | {H}-[BhPra]YCQKW |
| | | [Nle]WTCDSKRACCEGLRC |
| | | KLWCRKEI{Amide} |
| 1523 | CyA-[BhPra1;Nle6;Glu28]JzTx-V(1-29) | {H}-[CyA][BhPra]CQKW |
| | | [Nle]WTCDSKRACCEGLRC |
| | | KLWCRKEI{Amide} |
| 1524 | CyA-[Nle6;BhPra11;Glu28]JzTx-V(1-29) | {H}-[CyA]YCQKW[Nle]W |
| | | TCD[BhPra]KRACCEGLRC |
| | | KLWCRKEI{Amide} |
| 1525 | CyA-[Nle6;BhPra12;Glu28]JzTx-V(1-29) | {H}-[CyA]YCQKW[Nle]W |
| | | TCDS[BhPra]RACCEGLRC |
| | | KLWCRKEI{Amide} |
| 1526 | CyA-[Nle6;BhPra14;Glu28]JzTx-V(1-29) | {H}-[CyA]YCQKW[Nle]W |
| | | TCDSKR[BhPra]CCEGLRC |
| | | KLWCRKEI{Amide} |
| 1527 | CyA-[Nle6;BhPra17;Glu28]JzTx-V(1-29) | {H}-[CyA]YCQKW[Nle]W |
| | | TCDSKRACC[BhPra]GLRC |
| | | KLWCRKEI{Amide} |
| 1528 | EPA-[Nle6]JzTx-V(1-29) | {H}-[EPA]YCQKW[Nle]W |
| | | TCDSKRACCEGLRCKLWCRK |
| | | II{Amide} |
| 1529 | CyA-[EPA1;Nle6]JzTx-V(1-29) | {H}-[CyA][EPA]CQKW |
| | | [Nle]WTCDSKRACCEGLRC |
| | | KLWCRKII{Amide} |
| 1530 | CyA-[Nle6;EPA11]JzTx-V(1-29) | {H}-[CyA]YCQKW[Nle]W |
| | | TCD[EPA]KRACCEGLRCKL |
| | | WCRKII{Amide} |
| 1531 | CyA-[Nle6;EPA12]JzTx-V(1-29) | {H}-[CyA]YCQKW[Nle]W |
| | | TCDS[EPA]RACCEGLRCKL |
| | | WCRKII{Amide} |
| 1532 | CyA-[Nle6;EPA14]JzTx-V(1-29) | {H}-[CyA]YCQKW[Nle]W |
| | | TCDSKR[EPA]CCEGLRCKL |
| | | WCRKII{Amide} |
| 1533 | CyA-[Nle6;EPA17]JzTx-V(1-29) | {H}-[CyA]YCQKW[Nle]W |
| | | TCDSKRACC[EPA]GLRCKL |
| | | WCRKII{Amide} |
| 1534 | EPA-[Nle6;Glu28]JzTx-V(1-29) | {H}-[EPA]YCQKW[Nle]W |
| | | TCDSKRACCEGLRCKLWCRK |
| | | EI{Amide} |
| 1535 | CyA-[EPA1;Nle6;Glu28]JzTx-V(1-29) | {H}-[CyA][EPA]CQKW |
| | | [Nle]WTCDSKRACCEGLRC |
| | | KLWCRKEI{Amide} |
| 1536 | CyA-[Nle6;EPA11;Glu28]JzTx-V(1-29) | {H}-[CyA]YCQKW[Nle]W |
| | | TCD[EPA]KRACCEGLRCKL |
| | | WCRKEI{Amide} |
| 1537 | CyA-[Nle6;EPA12;Glu28]JzTx-V(1-29) | {H}-[CyA]YCQKW[Nle]W |
| | | TCDS[EPA]RACCEGLRCKL |
| | | WCRKEI{Amide} |
| 1538 | CyA-[Nle6;EPA14;Glu28]JzTx-V(1-29) | {H}-[CyA]YCQKW[Nle]W |
| | | TCDSKR[EPA]CCEGLRCKL |
| | | WCRKEI{Amide} |
| 1539 | CyA-[Nle6;EPA17;Glu28]JzTx-V(1-29) | {H}-[CyA]YCQKW[Nle]W |
| | | TCDSKRACC[EPA]GLRCKL |
| | | WCRKEI{Amide} |
| 1540 | Pra-[4-ClhF5;Nle6;Glu28]JzTx-V(1-29) | {H}-[Pra]YCQK[4-ClhF] |
| | | [Nle]WTCDSKRACCEGLRC |
| | | KLWCRKEI{Amide} |
| 1541 | Pra-[4-FhF5;Nle6;Glu28]JzTx-V(1-29) | {H}-[Pra]YCQK[4-FhF] |
| | | [Nle]WTCDSKRACCEGLRC |
| | | KLWCRKEI{Amide} |
| 1542 | Pra-[4-MehF5;Nle6;Glu28]JzTx-V(1-29) | {H}-[Pra]YCQK[4-MehF] |
| | | [Nle]WTCDSKRACCEGLRC |
| | | KLWCRKEI{Amide} |
| 1543 | Pra-[4-MeOhF5;Nle6;Glu28]JzTx-V(1-29) | {H}-[Pra]YCQK |
| | | [4-MeOhF][Nle]WTCDSK |
| | | RACCEGLRCKLWCRKEI |
| | | {Amide} |
| 1544 | Pra-[3-BrhF5;Nle6;Glu28]JzTx-V(1-29) | {H}-[Pra]YCQK[3-BrhF] |
| | | [Nle]WTCDSKRACCEGLRC |
| | | KLWCRKEI{Amide} |
| 1545 | Pra-[3-ClhF5;Nle6;Glu28]JzTx-V(1-29) | {H}-[Pra]YCQK[3-ClhF] |
| | | [Nle]WTCDSKRACCEGLRC |
| | | KLWCRKEI{Amide} |
| 1546 | Pra-[3-FhF5;Nle6;Glu28]JzTx-V(1-29) | {H}-[Pra]YCQK[3-FhF] |
| | | [Nle]WTCDSKRACCEGLRC |
| | | KLWCRKEI{Amide} |
| 1547 | Pra-[3-MehF5;Nle6;Glu28]JzTx-V(1-29) | {H}-[Pra]YCQK[3-MehF] |
| | | [Nle]WTCDSKRACCEGLRC |
| | | KLWCRKEI{Amide} |
| 1548 | Pra-[3-MeOhF5;Nle6;Glu28]JzTx-V(1-29) | {H}-[Pra]YCQK |
| | | [3-MeOhF][Nle]WTCDSK |
| | | RACCEGLRCKLWCRKEI |
| | | {Amide} |
| 1549 | Pra-[2-BrhF5;Nle6;Glu28]JzTx-V(1-29) | {H}-[Pra]YCQK[2-BrhF] |
| | | [Nle]WTCDSKRACCEGLRC |
| | | KLWCRKEI{Amide} |
| 1550 | Pra-[2-ClhF5;Nle6;Glu28]JzTx-V(1-29) | {H}-[Pra]YCQK[2-ClhF] |
| | | [Nle]WTCDSKRACCEGLRC |
| | | KLWCRKEI{Amide} |
| 1551 | Pra-[2-FhF5;Nle6;Glu28]JzTx-V(1-29) | {H}-[Pra]YCQK[2-FhF] |
| | | [Nle]WTCDSKRACCEGLRC |
| | | KLWCRKEI{Amide} |
| 1552 | Pra-[2-MehF5;Nle6;Glu28]JzTx-V(1-29) | {H}-[Pra]YCQK[2-MehF] |
| | | [Nle]WTCDSKRACCEGLRC |
| | | KLWCRKEI{Amide} |
| 1553 | Pra-[2-MeOhF5;Nle6;Glu28]JzTx-V(1-29) | {H}-[Pra]YCQK |
| | | [2-MeOhF][Nle]WTCDSK |
| | | RACCEGLRCKLWCRKEI |
| | | {Amide} |
| 1554 | Pra-[4-ClhF5;Nle6;Glu28;Cha29] | {H}-[Pra]YCQK[4-ClhF] |
| | JzTx-V(1-29) | [Nle]WTCDSKRACCEGLRC |
| | | KLWCRKE[Cha]{Amide} |
| 1555 | Pra-[4-FhF5;Nle6;Glu28;Cha29] | {H}-[Pra]YCQK[4-FhF] |
| | JzTx-V(1-29) | [Nle]WTCDSKRACCEGLRC |
| | | KLWCRKE[Cha]{Amide} |
| 1556 | Pra-[4-MehF5;Nle6;Glu28;Cha29] | {H}-[Pra]YCQK[4-MehF] |
| | JzTx-V(1-29) | [Nle]WTCDSKRACCEGLRC |
| | | KLWCRKE[Cha]{Amide} |
| 1557 | Pra-[4-MeOhF5;Nle6;Glu28;Cha29] | {H}-[Pra]YCQK |
| | JzTx-V(1-29) | [4-MeOhF][Nle]WTCDSK |
| | | RACCEGLRCKLWCRKE |
| | | [Cha]{Amide} |
| 1558 | Pra-[3-BrhF5;Nle6;Glu28;Cha29] | {H}-[Pra]YCQK[3-BrhF] |
| | JzTx-V(1-29) | [Nle]WTCDSKRACCEGLRC |
| | | KLWCRKE[Cha]{Amide} |
| 1559 | Pra-[3-ClhF5;Nle6;Glu28;Cha29] | {H}-[Pra]YCQK[3-ClhF] |
| | JzTx-V(1-29) | [Nle]WTCDSKRACCEGLRC |
| | | KLWCRKE[Cha]{Amide} |
| 1560 | Pra-[3-FhF5;Nle6;Glu28;Cha29] | {H}-[Pra]YCQK[3-FhF] |
| | JzTx-V(1-29) | [Nle]WTCDSKRACCEGLRC |
| | | KLWCRKE[Cha]{Amide} |
| 1561 | Pra-[3-MehF5;Nle6;Glu28;Cha29] | {H}-[Pra]YCQK[3-MehF] |
| | JzTx-V(1-29) | [Nle]WTCDSKRACCEGLRC |
| | | KLWCRKE[Cha]{Amide} |
| 1562 | Pra-[3-MeOhF5;Nle6;Glu28;Cha29] | {H}-[Pra]YCQK |
| | JzTx-V(1-29) | [3-MeOhF][Nle]WTCDSK |
| | | RACCEGLRCKLWCRKE |
| | | [Cha]{Amide} |
| 1563 | Pra-[2-BrhF5;Nle6;Glu28;Cha29] | {H}-[Pra]YCQK[2-BrhF] |
| | JzTx-V(1-29) | [Nle]WTCDSKRACCEGLRC |
| | | KLWCRKE[Cha]{Amide} |
| 1564 | Pra-[2-ClhF5;Nle6;Glu28;Cha29] | {H}-[Pra]YCQK[2-ClhF] |
| | JzTx-V(1-29) | [Nle]WTCDSKRACCEGLRC |
| | | KLWCRKE[Cha]{Amide} |
| 1565 | Pra-[2-FhF5;Nle6;Glu28;Cha29] | {H}-[Pra]YCQK[2-FhF] |
| | JzTx-V(1-29) | [Nle]WTCDSKRACCEGLRC |
| | | KLWCRKE[Cha]{Amide} |
| 1566 | Pra-[2-MehF5;Nle6;Glu28;Cha29] | {H}-[Pra]YCQK[2-MehF] |
| | JzTx-V(1-29) | [Nle]WTCDSKRACCEGLRC |
| | | KLWCRKE[Cha]{Amide} |
| 1567 | Pra-[2-MeOhF5;Nle6;Glu28;Cha29] | {H}-[Pra]YCQK |
| | JzTx-V(1-29) | [2-MeOhF][Nle]WTCDSK |
| | | RACCEGLRCKLWCRKE |
| | | [Cha]{Amide} |
| 1568 | CyA-[4-ClhF5;Nle6;Pra17;Glu28] | {H}-[CyA]YCQK[4-ClhF] |
| | JzTx-V(1-29) | [Nle]WTCDSKRACC[Pra] |
| | | GLRCKLWCRKEI{Amide} |
| 1569 | CyA-[4-FhF5;Nle6;Pra17;Glu28] | {H}-[CyA]YCQK[4-FhF] |
| | JzTx-V(1-29) | [Nle]WTCDSKRACC[Pra] |
| | | GLRCKLWCRKEI{Amide} |
| 1570 | CyA-[4-MehF5;Nle6;Pra17;Glu28] | {H}-[CyA]YCQK[4-MehF] |
| | JzTx-V(1-29) | [Nle]WTCDSKRACC[Pra] |
| | | GLRCKLWCRKEI{Amide} |
| 1571 | CyA-[4-MeOhF5;Nle6;Pra17;Glu28] | {H}-[CyA]YCQK |
| | JzTx-V(1-29) | [4-MeOhF][Nle]WTCDSK |
| | | RACC[Pra]GLRCKLWCRKE |
| | | I{Amide} |
| 1572 | CyA-[3-BrhF5;Nle6;Pra17;Glu28] | {H}-[CyA]YCQK[3-BrhF] |
| | JzTx-V(1-29) | [Nle]WTCDSKRACC[Pra] |
| | | GLRCKLWCRKEI{Amide} |
| 1573 | CyA-[3-ClhF5;Nle6;Pra17;Glu28] | {H}-[CyA]YCQK[3-ClhF] |
| | JzTx-V(1-29) | [Nle]WTCDSKRACC[Pra] |
| | | GLRCKLWCRKEI{Amide} |
| 1574 | CyA-[3-FhF5;Nle6;Pra17;Glu28] | {H}-[CyA]YCQK[3-FhF] |
| | JzTx-V(1-29) | [Nle]WTCDSKRACC[Pra] |
| | | GLRCKLWCRKEI {Amide} |
| 1575 | CyA-[3-MehF5;Nle6;Pra17;Glu28] | {H}-[CyA]YCQK[3-MehF] |
| | JzTx-V(1-29) | [Nle]WTCDSKRACC[Pra] |
| | | GLRCKLWCRKEI{Amide} |
| 1576 | CyA-[3-MeOhF5;Nle6;Pra17;Glu28] | {H}-[CyA]YCQK |
| | JzTx-V(1-29) | [3-MeOhF][Nle]WTCDSK |
| | | RACC[Pra]GLRCKLWCRKE |
| | | I{Amide} |
| 1577 | CyA-[2-BrhF5;Nle6;Pra17;Glu28] | {H}-[CyA]YCQK[2-BrhF] |
| | JzTx-V(1-29) | [Nle]WTCDSKRACC[Pra] |
| | | GLRCKLWCRKEI{Amide} |
| 1578 | CyA-[2-ClhF5;Nle6;Pra17;Glu28] | {H}-[CyA]YCQK[2-ClhF] |
| | JzTx-V(1-29) | [Nle]WTCDSKRACC[Pra] |
| | | GLRCKLWCRKEI{Amide} |
| 1579 | CyA-[2-FhF5;Nle6;Pra17;Glu28] | {H}-[CyA]YCQK[2-FhF] |
| | JzTx-V(1-29) | [Nle]WTCDSKRACC[Pra] |
| | | GLRCKLWCRKEI{Amide} |
| 1580 | CyA-[2-MehF5;Nle6;Pra17;Glu28] | {H}-[CyA]YCQK[2-MehF] |
| | JzTx-V(1-29) | [Nle]WTCDSKRACC[Pra] |
| | | GLRCKLWCRKEI{Amide} |
| 1581 | CyA-[2-MeOhF5;Nle6;Pra17;Glu28] | {H}-[CyA]YCQK |
| | JzTx-V(1-29) | [2-MeOhF][Nle]WTCDSK |
| | | RACC[Pra]GLRCKLWCRKE |
| | | I{Amide} |
| 1582 | CyA-[4-ClhF5;Nle6;Pra17;Glu28; | {H}-[CyA]YCQK[4-ClhF] |
| | Cha29]JzTx-V(1-29) | [Nle]WTCDSKRACC[Pra] |
| | | GLRCKLWCRKE[Cha] |
| | | {Amide} |
| 1583 | CyA-[4-FhF5;Nle6;Pra17;Glu28; | {H}-[CyA]YCQK[4-FhF] |
| | Cha29]JzTx-V(1-29) | [Nle]WTCDSKRACC[Pra] |
| | | GLRCKLWCRKE[Cha] |
| | | {Amide} |
| 1584 | CyA-[4-MehF5;Nle6;Pra17;Glu28; | {H}-[CyA]YCQK[4-MehF] |
| | Cha29]JzTx-V(1-29) | [Nle]WTCDSKRACC[Pra] |
| | | GLRCKLWCRKE[Cha] |
| | | {Amide} |
| 1585 | CyA-[4-MeOhF5;Nle6;Pra17;Glu28; | {H}-[CyA]YCQK |
| | Cha29]JzTx-V(1-29) | [4-MeOhF][Nle]WTCDSK |
| | | RACC[Pra]GLRCKLWCRKE |
| | | [Cha]{Amide} |
| 1586 | CyA-[3-BrhF5;Nle6;Pra17;Glu28; | {H}-[CyA]YCQK[3-BrhF] |
| | Cha29]JzTx-V(1-29) | [Nle]WTCDSKRACC[Pra] |
| | | GLRCKLWCRKE[Cha] |
| | | {Amide} |
| 1587 | CyA-[3-ClhF5;Nle6;Pra17;Glu28; | {H}-[CyA]YCQK[3-ClhF] |
| | Cha29]JzTx-V(1-29) | [Nle]WTCDSKRACC[Pra] |
| | | GLRCKLWCRKE[Cha] |
| | | {Amide} |
| 1588 | CyA-[3-FhF5;Nle6;Pra17;Glu28; | {H}-[CyA]YCQK[3-FhF] |
| | Cha29]JzTx-V(1-29) | [Nle]WTCDSKRACC[Pra] |
| | | GLRCKLWCRKE[Cha] |
| | | {Amide} |
| 1589 | CyA-[3-MehF5;Nle6;Pra17;Glu28; | {H}-[CyA]YCQK[3-MehF] |
| | Cha29]JzTx-V(1-29) | [Nle]WTCDSKRACC[Pra] |
| | | GLRCKLWCRKE[Cha] |
| | | {Amide} |
| 1590 | CyA-[3-MeOhF5;Nle6;Pra17;Glu28; | {H}-[CyA]YCQK |
| | Cha29]JzTx-V(1-29) | [3-MeOhF][Nle]WTCDSK |
| | | RACC[Pra]GLRCKLWCRKE |
| | | [Cha]{Amide} |
| 1591 | CyA-[2-BrhF5;Nle6;Pra17;Glu28; | {H}-[CyA]YCQK[2-BrhF] |
| | Cha29]JzTx-V(1-29) | [Nle]WTCDSKRACC[Pra] |
| | | GLRCKLWCRKE[Cha] |
| | | {Amide} |
| 1592 | CyA-[2-ClhF5;Nle6;Pra17;Glu28; | {H}-[CyA]YCQK[2-ClhF] |
| | Cha29]JzTx-V(1-29) | [Nle]WTCDSKRACC[Pra] |
| | | GLRCKLWCRKE[Cha] |
| | | {Amide} |
| 1593 | CyA-[2-FhF5;Nle6;Pra17;Glu28; | {H}-[CyA]YCQK[2-FhF] |
| | Cha29]JzTx-V(1-29) | [Nle]WTCDSKRACC[Pra] |
| | | GLRCKLWCRKE[Cha] |
| | | {Amide} |
| 1594 | CyA-[2-MehF5;Nle6;Pra17;Glu28; | {H}-[CyA]YCQK[2-MehF] |
| | Cha29]JzTx-V(1-29) | [Nle]WTCDSKRACC[Pra] |
| | | GLRCKLWCRKE[Cha] |
| | | {Amide} |
| 1595 | CyA-[2-MeOhF5;Nle6;Pra17;Glu28; | {H}-[CyA]YCQK |
| | Cha29]JzTx-V(1-29) | [2-MeOhF][Nle]WTCDSK |
| | | RACC[Pra]GLRCKLWCRKE |
| | | [Cha]{Amide} |
| 1596 | Pra-[Glu1,14,28;hPhe5;Nle6] | {H}-[Pra]ECQK[hPhe] |
| | JzTx-V(1-29) | [Nle]WTCDSKRECCEGLRC |
| | | KLWCRKEI{Amide} |
| 1597 | Pra-[Glu1,14,28;Nle6;Cha29] | {H}-[Pra]ECQKW[Nle]W |
| | JzTx-V(1-29) | TCDSKRECCEGLRCKLWCRK |
| | | E[Cha]{Amide} |
| 1598 | Pra-[Glu1,14,28;hPhe5;Nle6; | {H}-[Pra]ECQK[hPhe] |
| | Cha29]JzTx-V(1-29) | [Nle]WTCDSKRECCEGLRC |
| | | KLWCRKE[Cha]{Amide} |
| 1599 | Glu-[Pra1;hPhe5;Nle6;Glu11,28] | {H}-E[Pra]CQK[hPhe] |
| | JzTx-V(1-29) | [Nle]WTCDEKRACCEGLRC |
| | | KLWCRKEI{Amide} |
| 1600 | Glu-[Pra1;hPhe5;Nle6;Glu14,28] | {H}-E[Pra]CQK[hPhe] |
| | JzTx-V(1-29) | [Nle]WTCDSKRECCEGLRC |
| | | KLWCRKEI{Amide} |
| 1601 | Glu-[Pra1;hPhe5;Nle6;Glu11,28; | {H}-E[Pra]CQK[hPhe] |
| | Cha29]JzTx-V(1-29) | [Nle]WTCDEKRACCEGLRC |
| | | KLWCRKE[Cha]{Amide} |
| 1602 | Glu-[Pra1;hPhe5;Nle6;Glu14,28; | {H}-E[Pra]CQK[hPhe] |
| | Cha29]JzTx-V(1-29) | [Nle]WTCDSKRECCEGLRC |
| | | KLWCRKE[Cha]{Amide} |
| 1603 | Pra-[4-BrhF5;Nle6;Glu28] | {H}-[Pra]YCQK[4-BrhF] |
| | JzTx-V(1-29) | [Nle]WTCDSKRACCEGLRC |
| | | KLWCRKEI{Amide} |
| 1604 | Pra-[4-BrhF5;Nle6;Glu28;Cha29] | {H}-[Pra]YCQK[4-BrhF] |
| | JzTx-V(1-29) | [Nle]WTCDSKRACCEGLRC |
| | | KLWCRKE[Cha]{Amide} |
| 1605 | CyA-[4-BrhF5;Nle6;Pra17;Glu28] | {H}-[CyA]YCQK[4-BrhF] |
| | JzTx-V(1-29) | [Nle]WTCDSKRACC[Pra] |
| | | GLRCKLWCRKEI{Amide} |
| 1606 | CyA-[4-BrhF5;Nle6;Pra17;Glu28; | {H}-[CyA]YCQK[4-BrhF] |
| | Cha29]JzTx-V(1-29) | [Nle]WTCDSKRACC[Pra] |
| | | GLRCKLWCRKE[Cha] |
| | | {Amide} |
| 1607 | CyA-[Nle6;Pra17;4tBu-F24;Glu28] | {H}-[CyA]YCQKW[Nle]W |
| | JzTx-V(1-29) | TCDSKRACC[Pra]GLRCKL |
| | | [4tBu-F]CRKEI{Amide} |
| 1608 | Pra-[Nle6;4tBu-F24;Glu28]JzTx-V(1-29) | {H}-[Pra]YCQKW[Nle]W |
| | | TCDSKRACCEGLRCKL |
| | | [4tBu-PF]CRKEI{Amide} |
| 1609 | Pra-[Nle6;6-BrW24;Glu28]JzTx-V(1-29) | {H}-[Pra]YCQKW[Nle]W |
| | | TCDSKRACCEGLRCKL |
| | | [6-BrW]CRKEI{Amide} |
| 1610 | Pra-[Nle6;6-MeW24;Glu28]JzTx-V(1-29) | {H}-[Pra]YCQKW[Nle]W |
| | | TCDSKRACCEGLRCKL |
| | | [6-MeW]CRKEI{Amide} |
| 1611 | Pra-[Nle6;7-BrW24;Glu28]JzTx-V(1-29) | {H}-[Pra]YCQKW[Nle]W |
| | | TCDSKRACCEGLRCKL |
| | | [7-BrW]CRKEI{Amide} |
| 1612 | Pra-[Nle6;Phe29]JzTx-V(1-29) | {H}-[Pra]YCQKW[Nle]W |
| | | TCDSKRACCEGLRCKLWCRK |
| | | IF{Amide} |
| 1613 | Pra-[Nle6;hPhe29]JzTx-V(1-29) | {H}-[Pra]YCQKW[Nle]W |
| | | TCDSKRACCEGLRCKLWCRK |
| | | I[hPhe]{Amide} |
| 1614 | Pra-[Nle6;4-Me-F29]JzTx-V(1-29) | {H}-[Pra]YCQKW[Nle]W |
| | | TCDSKRACCEGLRCKLWCRK |
| | | I[4-Me-F]{Amide} |
| 1615 | CyA-[Nle6;Pra17;Glu28;4-Me-F29] | {H}-[CyA]YCQKW[Nle]W |
| | JzTx-V(1-29) | TCDSKRACC[Pra]GLRCKL |
| | | WCRKE[4-Me-F]{Amide} |
| 1616 | CyA-[Nle6;Pra17;Cit20;5-BrW24; | {H}-[CyA]YCQKW[Nle]W |
| | Glu28]JzTx-V(1-29) | TCDSKRACC[Pra]GL |
| | | [Cit]CKL[5-BrW]CRKEI |
| | | {Amide} |
| 1617 | CyA-[Nle6;Pra17;Cit20;BrW24; | {H}-[CyA]YCQKW[Nle]W |
| | Glu28]JzTx-V(1-26;5-29)-Gly- | TCDSKRACC[Pra]GL |
| | FreeAcid | [Cit]CKL[5-BrW]C |
| | | [Cit]KEIG{FreeAcid} |
| 1618 | Glu-[Nle6;Pra17;Cit26;Glu28] | {H}-EYCQKW[Nle]WTCDS |
| | JzTx-V(1-29)-Gly-FreeAcid | KRACC[Pra]GLRCKLWC |
| | | [Cit]KEIG{FreeAcid} |
| 1619 | Glu-Nva-[Nle6;Pra17;5-BrW24; | {H}-E[Nva]YCQKW[Nle] |
| | Glu28]JzTx-V(1-29) | WTCDSKRACC[Pra]GLRCK |
| | | L[5-BrW]CRKEI{Amide} |
| 1620 | Glu-Nva-[Nle6;Pra11;Glu28] | {H}-E[Nva]YCQKW[Nle] |
| | JzTx-V(1-29) | WTCD[Pra]KRACCEGLRCK |
| | | LWCRKEI{Amide} |
| 1621 | Glu-Nva-[Nle6;Pra11;5-BrW24; | {H}-E[Nva]YCQKW[Nle] |
| | Glu28]JzTx-V(1-29) | WTCD[Pra]KRACCEGLRCK |
| | | L[5-BrW]CRKEI{Amide} |
| 1622 | Glu-Nva-[Nle6;Pra11;5-BrW24;Glu28; | {H}-E[Nva]YCQKW[Nle] |
| | Trp29]JzTx-V(1-29) | WTCD[Pra]KRACCEGLRCK |
| | | L[5-BrW]CRKEW{Amide} |
| 1623 | Glu-Nva-[Nle6;Pra11;5-BrW24;Glu28; | {H}-E[Nva]YCQKW[Nle] |
| | 4tBu-F29]JzTx-V(1-29) | WTCD[Pra]KRACCEGLRCK |
| | | L[5-BrW]CRKE[4tBu-F] |
| | | {Amide} |
| 1624 | CyA-[Nle6;Pra11;5-BrW24;Glu28] | {H}-[CyA]YCQKW[Nle]W |
| | JzTx-V(1-29) | TCD[Pra]KRACCEGLRCKL |
| | | [5-BrW]CRKEI{Amide} |
| 1625 | CyA-[Nle6;Pra11;4tBu-F24;Glu28] | {H}-[CyA]YCQKW[Nle]W |
| | JzTx-V(1-29) | TCD[Pra]KRACCEGLRCKL |
| | | [4tBu-F]CRKEI{Amide} |
| 1626 | CyA-[Nle6;Pra11;Glu12;5-BrW24] | {H}-[CyA]YCQKW[Nle]W |
| | JzTx-V(1-29) | TCD[Pra]ERACCEGLRCKL |
| | | [5-BrW]CRKII{Amide} |
| 1627 | Nva-[Nle6;Pra11;Glu28]JzTx-V(1-29) | {H}-[Nva]YCQKW[Nle]W |
| | | TCD[Pra]KRACCEGLRCKL |
| | | WCRKEI{Amide} |
| 1628 | Nva-[Nle6;Pra11;Glu12,28] | {H}-[Nva]YCQKW[Nle]W |
| | JzTx-V(1-29) | TCD[Pra]ERACCEGLRCKL |
| | | WCRKEI{Amide} |
| 1629 | CyA-[Nle6;Pra11;Glu12,28; | {H}-[CyA]YCQKW[Nle]W |
| | 5-BrW24]JzTx-V(1-29) | TCD[Pra]ERACCEGLRCKL |
| | | [5-BrW]CRKEI{Amide} |
| 1630 | CyA-[Nle6;Pra17;5-BrW24;Glu28] | {H}-[CyA]YCQKW[Nle]W |
| | JzTx-V(1-29)-Gly-FreeAcid | TCDSKRACC[Pra]GLRCKL |
| | | [5-BrW]CRKEIG |
| | | {FreeAcid} |
| 1631 | CyA-[Nle6;Pra17;5-BrW24;Glu28] | {H}-[CyA]YCQKW[Nle]W |
| | JzTx-V(1-29)-Gly-Glu-FreeAcid | TCDSKRACC[Pra]GLRCKL |
| | | [5-BrW]CRKEIGE |
| | | {FreeAcid} |
| 1632 | CyA-[Nle6;Pra17;Cit20;Glu28] | {H}-[CyA]YCQKW[Nle]W |
| | JzTx-V(1-29) | TCDSKRACC[Pra]GL |
| | | [Cit]CKLWCRKEI |
| | | {Amide} |
| 1633 | CyA-[Nle6;Pra17;Cit20,26;Glu28] | {H}-[CyA]YCQKW[Nle]W |
| | JzTx-V(1-29) | TCDSKRACC[Pra]GL |
| | | [Cit]CKLWC[Cit]KEI |
| | | {Amide} |
| 1634 | CyA-[Nle6;Pra17;5-BrW24;Cit26; | {H}-[CyA]YCQKW[Nle]W |
| | Glu28]JzTx-V(1-29) | TCDSKRACC[Pra]GLRCKL |
| | | [5-BrW]C[Cit]KEI |
| | | {Amide} |
| 1635 | Pra-[Nle6;5-BrW24;Glu28;Phe29] | {H}-[Pra]YCQKW[Nle]W |
| | JzTx-V(1-29)-Gly-Glu-FreeAcid | TCDSKRACCEGLRCKL |
| | | [5-BrW]CRKEFGE |
| | | {FreeAcid} |
| 1636 | Nva-[hPhe5;Nle6;Glu11,28;Pra17; | {H}-[Nva]YCQK[hPhe] |
| | 5-BrW24]JzTx-V(1-29) | [Nle]WTCDEKRACC[Pra] |
| | | GLRCKL[5-BrW]CRKEI |
| | | {Amide} |
| 1637 | Nva-[hPhe5;Nle6;Pra17;5-BrW24; | {H}-[Nva]YCQK[hPhe] |
| | Glu28]JzTx-V(1-29) | [Nle]WTCDSKRACC[Pra] |
| | | GLRCKL[5-BrW]CRKEI |
| | | {Amide} |
| 1638 | Nva-[hPhe5;Nle6;Pra11;5-BrW24; | {H}-[Nva]YCQK[hPhe] |
| | Glu28]JzTx-V(1-29) | [Nle]WTCD[Pra]KRACCE |
| | | GLRCKL [5-BrW]CRKEI |
| | | {Amide} |
| 1639 | Nva-[4-Cl-F5;Nle6;Pra11;5-BrW24; | {H}-[NvA]YCQK |
| | Glu28]JzTx-V(1-29) | [4-Cl-F][Nle]WTCD |
| | | [Pra]KRACCEGLRCKL |
| | | [5-BrW]CRKEI {Amide} |
| 1640 | Nva-[4-Cl-F5;Nle6;Pra11;Glu28] | {H}-[Nva]YCQK |
| | JzTx-V(1-29) | [4-Cl-F][Nle]WTCD |
| | | [Pra]KRACCEGLRCKLWCR |
| | | KEI{Amide} |
| 1641 | CyA-[hPhe5;Nle6;Pra17;Glu27,28] | {H}-[CyA]YCQK[hPhe] |
| | JzTx-V(1-29) | [Nle]WTCDSKRACC[Pra] |
| | | GLRCKLWCREEI{Amide} |
| 1642 | Pra-[Nle6;Glu12;Gln27]JzTx-V(1-29) | {H}-[Pra]YCQKW[Nle]W |
| | | TCDSERACCEGLRCKLWCRQ |
| | | II{Amide} |
| 1643 | Glu-[Nva1;Nle6;Pra11;5-BrW24; | {H}-E[Nva]CQKW[Nle]W |
| | Glu27,28]JzTx-V(1-29) | TCD[Pra]KRACCEGLRCKL |
| | | [5-BrW]CREEI{Amide} |
| 1644 | Pra-[Nle6;Glu28;Phe29] | {H}-[Pra]YCQKW[Nle]W |
| | JzTx-V(1-29)-Gly-FreeAcid | TCDSKRACCEGLRCKLWCRK |
| | | EFG{FreeAcid} |
| 1645 | Nva-[hPhe5;Nle6;Glu14,28;Pra17] | {H}-[Nva]YCQK[hPhe] |
| | JzTx-V(1-29) | [Nle]WTCDSKRECC[Pra] |
| | | GLRCKLWCRKEI{Amide} |
| 1646 | Glu-[Nva1;Nle6;Pra17;Glu27] | {H}-E[Nva]CQKW[Nle]W |
| | JzTx-V(1-29)-Gly-FreeAcid | TCDSKRACC[Pra]GLRCKL |
| | | WCREIIG{FreeAcid} |
| 1647 | Glu-[Nva1;Nle6;Pra17;Gln27;Glu28] | {H}-E[Nva]CQKW[Nle]W |
| | JzTx-V(1-29)-Gly-FreeAcid | TCDSKRACC[Pra]GLRCKL |
| | | WCRQEIG{FreeAcid} |
| 1648 | CyA-[Nle6;Glu12;Pra17;Gln27] | {H}-[CyA]YCQKW[Nle]W |
| | JzTx-V(1-29) | TCDSERACC[Pra]GLRCKL |
| | | WCRQII{Amide} |
| 1649 | Pra-[hPhe5;Nle6;5-BrW24;Glu28; | {H}-[Pra]YCQK[hPhe] |
| | Phe29]JzTx-V(1-29) | [Nle]WTCDSKRACCEGLRC |
| | | KL[5-BrW]CRKEF |
| | | {Amide} |
| 1650 | CyA-[hPhe5;Nle6;Pra11;5-BrW24; | {H}-[CyA]YCQK[hPhe] |
| | Glu28;Phe29]JzTx-V(1-29) | [Nle]WTCD[Pra]KRACCE |
| | | GLRCKL[5-BrW]CRKEF |
| | | {Amide} |
| 1651 | Glu-[hPhe5;Nle6;5-BrW24;Glu28; | {H}-EYCQK[hPhe][Nle] |
| | Phe29]JzTx-V(1-29) | WTCDSKRACC[Pra]GLRCK |
| | | L[5-BrW]CRKEF{Amide} |
| 1652 | CyA-[Nle6;Pra17;Chg23;5-BrW24; | {H}-[CyA]YCQKW[Nle]W |
| | Glu28]JzTx-V(1-29) | TCDSKRACC[Pra]GLRCK |
| | | [Chg][5-BrW]CRKEI |
| | | {Amide} |
| 1653 | Glu-[hPhe5;Nle6;Pra11;Chg23; | {H}-EYCQK[hPhe][Nle] |
| | Glu28;Phe29]JzTx-V(1-29) | WTCD[Pra]KRACCEGLRCK |
| | | [Chg]WCRKEF{Amide} |
| 1654 | Pra-[Nle6;Glu11,28;Chg23;Phe29] | {H}-[Pra]YCQKW[Nle]W |
| | JzTx-V(1-29)-Gly-FreeAcid | TCDEKRACCEGLRCK[Chg] |
| | | WCRKEFG{FreeAcid} |
| 1655 | Pra-[Nle6;Cit20;Chg23;Glu28] | {H}-[Pra]YCQKW[Nle]W |
| | JzTx-V(1-29) | TCDSKRACCEGL[Cit]CK |
| | | [Chg]WCRKEI{Amide} |
| 1656 | Glu-[Nle6;Pra17;Cit20;Chg23; | {H}-EYCQKW[Nle]WTCDS |
| | Glu28]JzTx-V(1-29) | KRACC[Pra]GL[Cit]CK |
| | | [Chg]WCRKEI{Amide} |
| 1657 | CyA-[Glu1,28;Nle6;Pra11;Chg23; | {H}-[CyA]ECQKW[Nle]W |
| | 5-BrW24]JzTx-V(1-29) | TCD[Pra]KRACCEGLRCK |
| | | [Chg][5-BrW]CRKEI |
| | | {Amide} |
| 1658 | CyA-[Glu1,11,28;Nle6;Pra17; | {H}-[CyA]ECQKW[Nle]W |
| | 5-BrW24]JzTx-V(1-29) | TCDEKRACC[Pra]GLRCKL |
| | | [5-BrW]CRKEI{Amide} |
| 1659 | Nva-[hPhe5;Nle6;Glu11,28;Pra17; | {H}-[Nva]YCQK[hPhe] |
| | Cit20;Chg23;5-BrW24;Phe29] | [Nle]WTCDEKRACC[Pra] |
| | JzTx-V(1-29) | GL[Cit]CK[Chg] |
| | | [5-BrW]CRKEF{Amide} |
| 1660 | Pra-[hPhe5;Nle6;Glu11,28;Cit20; | {H}-[Pra]YCQK[hPhe] |
| | Chg23;5-BrW24;Phe29]JzTx-V(1-29) | [Nle]WTCDEKRACCEGL |
| | | [Cit]CK[Chg][5-BrW]C |
| | | RKEF{Amide} |
| 1661 | Nva-[hPhe5;Nle6;Glu14;Pra17; | {H}-[Nva]YCQK[hPhe] |
| | 5-BrW24;Phe29]JzTx-V(1-29) | [Nle]WTCDSKRECC[Pra] |
| | | GLRCKL[5-BrW]CRKIF |
| | | {Amide} |
| 1662 | CyA-[Nle6;Pra17;5-MeW24;Glu28] | {H}-[CyA]YCQKW[Nle]W |
| | JzTx-V(1-29) | TCDSKRACC[Pra]GLRCKL |
| | | [5-MeW]CRKEI{Amide} |
| 1663 | Pra-[Nle6;5-MeW24;Glu28]JzTx-V(1-29) | {H}-[Pra]YCQKW[Nle]W |
| | | TCDSKRACCEGLRCKL |
| | | [5-MeW]CRKEI{Amide} |
| 1664 | [Nle6;Pra11;5-MeW24;Glu28]JzTx-V(1-29) | {H}-YCQKW[Nle]WTCD |
| | | [Pra]KRACCEGLRCKL |
| | | [5-MeW]CRKEI{Amide} |
| 1665 | CyA-[Nle6;Pra17;DiC1-F24;Glu28] | {H}-[CyA]YCQKW[Nle]W |
| | JzTx-V(1-29) | TCDSKRACC[Pra]GLRCKL |
| | | [DiC1-F]CRKEI{Amide} |
| 1666 | Pra-[Nle6;DiC1-F24;Glu28]JzTx-V(1-29) | {H}-[Pra]YCQKW[Nle]W |
| | | TCDSKRACCEGLRCKL |
| | | [DiC1-F]CRKEI{Amide} |
| 1667 | CyA-[Nle6;Ala9,21;Pra17;Glu28] | {H}-[CyA]YCQKW[Nle]W |
| | JzTx-V(1-29) | TADSKRACC[Pra]GLRAKL |
| | | WCRKEI{Amide} |
| 1668 | Pra-[Nle6;5-ClW24;Glu28]JzTx-V(1-29) | {H}-[Pra]YCQKW[Nle]W |
| | | TCDSKRACCEGLRCKL |
| | | [5-ClW]CRKEI{Amide} |
| 1669 | Pra-[Nle6;pI-Phe24;Glu28]JzTx-V(1-29) | {H}-[Pra]YCQKW[Nle]W |
| | | TCDSKRACCEGLRCKL |
| | | [pI-Phe]CRKEI{Amide} |
| 1670 | CyA-[Nle6;Pra17;5-ClW24;Glu28] | {H}-[CyA]YCQKW[Nle]W |
| | JzTx-V(1-29) | TCDSKRACC[Pra]GLRCKL |
| | | [5-ClW]CRKEI{Amide} |
| 1671 | CyA-[Nle6;Pra17;pI-Phe24;Glu28] | {H}-[CyA]YCQKW[Nle]W |
| | JzTx-V(1-29) | TCDSKRACC[Pra]GLRCKL |
| | | [pI-Phe]CRKEI{Amide} |
| 1672 | [CyA1;Nle6;Glu11,28;Pra17]JzTx-V(1-29) | {H}-[CyA]CQKW[Nle]WT |
| | | CDEKRACC[Pra]GLRCKLW |
| | | CRKEI{Amide} |
| 1673 | [CyA1;Nle6;Glu11,12,28;Pra17] | {H}-[CyA]CQKW[Nle]WT |
| | JzTx-V(1-29) | CDEERACC[Pra]GLRCKLW |
| | | CRKEI{Amide} |
| 1674 | [CyA1;Nle6;Glu11,12,28;Pra17;Val20] | {H}-[CyA]CQKW[Nle]WT |
| | JzTx-V(1-29) | CDEERACC[Pra]GLVCKLW |
| | | CRKEI{Amide} |
| 1675 | [CyA1;Nle6;Ala12;Pra17;Glu28] | {H}-[CyA]CQKW[Nle]WT |
| | JzTx-V(1-29) | CDSARACC[Pra]GLRCKLW |
| | | CRKEI{Amide} |
| 1676 | [CyA1;Nle6;Pra17;Asp18;Glu28] | {H}-[CyA]CQKW[Nle]WT |
| | JzTx-V(1-29) | CDSKRACC[Pra]DLRCKLW |
| | | CRKEI{Amide} |
| 1677 | [CyA1;Nle6;Glu12,28;Pra17;Asp18] | {H}-[CyA]CQKW[Nle]WT |
| | JzTx-V(1-29) | CDSERACC[Pra]DLRCKLW |
| | | CRKEI{Amide} |
| 1678 | [CyA1;Nle6;Glu12,28;Pra17;Asp18;Val20] | {H}-[CyA]CQKW[Nle]WT |
| | JzTx-V(1-29) | CDSERACC[Pra]DLVCKLW |
| | | CRKEI{Amide} |
| 1679 | [CyA1;Nle6;Pra17;Val20;Glu28] | {H}-[CyA]CQKW[Nle]WT |
| | JzTx-V(1-29) | CDSKRACC[Pra]GLVCKLW |
| | | CRKEI{Amide} |
| 1680 | [CyA1;Nle6;Pra17;Gln22;Glu28] | {H}-[CyA]CQKW[Nle]WT |
| | JzTx-V(1-29) | CDSKRACC[Pra]GLRCQLW |
| | | CRKEI{Amide} |
| 1681 | [CyA1;Nle6;Pra17;Tyr27;Glu28] | {H}-[CyA]CQKW[Nle]WT |
| | JzTx-V(1-29) | CDSKRACC[Pra]GLRCKLW |
| | | CRYEI{Amide} |
| 1682 | [CyA1;Nle6;Pra17;Leu27;Glu28] | {H}-[CyA]CQKW[Nle]WT |
| | JzTx-V(1-29) | CDSKRACC[Pra]GLRCKLW |
| | | CRLEI{Amide} |
| 1683 | [Pra1;Nle6;Glu11,12,28;Val20] | {H}-[Pra]CQKW[Nle]WT |
| | JzTx-V(1-29) | CDEERACCEGLVCKLWCRKE |
| | | I{Amide} |
| 1684 | [Pra1;Nle6;Ala12;Glu28]JzTx-V(1-29) | {H}-[Pra]CQKW[Nle]WT |
| | | CDSARACCEGLRCKLWCRKE |
| | | I{Amide} |
| 1685 | [Pra1;Nle6;Asp18;Glu28]JzTx-V(1-29) | {H}-[Pra]CQKW[Nle]WT |
| | | CDSKRACCEDLRCKLWCRKE |
| | | I{Amide} |
| 1686 | [Pra1;Nle6;Glu12,28;Asp18]JzTx-V(1-29) | {H}-[Pra]CQKW[Nle]WT |
| | | CDSERACCEDLRCKLWCRKE |
| | | I{Amide} |
| 1687 | [Pra1;Nle6;Glu12,28;Asp18;Val20] | {H}-[Pra]CQKW[Nle]WT |
| | JzTx-V(1-29) | CDSERACCEDLVCKLWCRKE |
| | | I{Amide} |
| 1688 | [Pra1;Nle6;Val20;Glu28]JzTx-V(1-29) | {H}-[Pra]CQKW[Nle]WT |
| | | CDSKRACCEGLVCKLWCRKE |
| | | I{Amide} |
| 1689 | [Pra1;Nle6;Tyr27;Glu28]JzTx-V(1-29) | {H}-[Pra]CQKW[Nle]WT |
| | | CDSKRACCEGLRCKLWCRYE |
| | | I{Amide} |
| 1690 | [Pra1;Nle6;Leu27;Glu28]JzTx-V(1-29) | {H}-[Pra]CQKW[Nle]WT |
| | | CDSKRACCEGLRCKLWCRLE |
| | | I{Amide} |
| 1691 | [CyA1;Nle6;Glu11,12 ;Pra17;Val20] | {H}-[CyA]CQKW[Nle]WT |
| | JzTx-V(1-29) | CDEERACC[Pra]GLVCKLW |
| | | CRKII{Amide} |
| 1692 | CyA-[Nle6,Atz(GGS-Br)17,Glu28] | {H}-[CyA]YCQKW[Nle]W |
| | JzTx-V(1-29) | TCDSKRACC[Pra] |
| | | ({Bromoacetyl}GGS |
| | | [Aha]{Amide})GLRCKLW |
| | | CRKEI{Amide} |
| 1693 | Atz-[Nle6;5-BrW24;Glu28]JzTx-V(1-29) | {H}-[Atz]YCQKW[Nle]W |
| | | TCDSKRACCEGLRCKL |
| | | [5-BrW]CRKEI{Amide} |
| 1694 | Glu-[Atz1;Nle6;Glu14,28]JzTx-V(1-29) | {H}-E[Atz]CQKW[Nle]W |
| | | TCDSKRECCEGLRCKLWCRK |
| | | EI{Amide} |

{H}- = amino group of N-terminal;
-{Amide} or {Amide} = amidated C-terminal;
Ac- = acetylated N-terminal;
-{Free Acid} = carboxylated C-terminal;
{biotin- = biotinylated N-terminal;
{4-Pen- = 4-pentynoylated N-terminal;
{bromoacetamide-PEG11-triazole}- = 3-1(1-(1-brom-2-oxo-6,9,12,15,18,21,24,27,30,33,36-undecaoxa-3-azaoctatriacontan-38-yl)-1H-1,2,3-triazol-4-yl)propanoyl covalently conjugated to N-terminal.

[0531] As stated herein above, in accordance with the present invention, the peptide portions of the inventive composition of matter can also be chemically derivatized at one or more amino acid residues by known organic chemistry techniques. “Chemical derivative” or “chemically derivatized” refers to a subject peptide having one or more residues chemically derivatized by reaction of a functional side group. Such derivatized molecules include, for example, those molecules in which free amino groups have been derivatized to form amine hydrochlorides, p-toluene sulfonyl groups, carbobenzoxy groups, t-butyloxycarbonyl groups, chloroacetyl groups or formyl groups. Free carboxyl groups may be derivatized to form salts, methyl and ethyl esters or other types of esters or hydrazides. Free hydroxyl groups may be derivatized to form O-acyl or O-alkyl derivatives. The imidazole nitrogen of histidine may be derivatized to form N-im-benzylhistidine. Also included as chemical derivatives are those peptides which contain one or more naturally occurring amino acid derivatives of the twenty canonical amino acids, whether in L- or D-form. For example, 4-hydroxyproline may be substituted for proline; 5-hydroxylysine maybe substituted for lysine; 3-methylhistidine may be substituted for histidine; homoserine may be substituted for serine; and ornithine may be substituted for lysine.

[0532] Useful derivatizations include, in some embodiments, those in which the amino terminal of the peptide is chemically blocked so that conjugation with the vehicle will be prevented from taking place at an N-terminal free amino group. There may also be other beneficial effects of such a modification, for example a reduction in the toxin peptide analog's susceptibility to enzymatic proteolysis. The N-terminus can be acylated or modified to a substituted amine, or derivatized with another functional group, such as an aromatic moiety (e.g., an indole acid, benzyl (Bz1 or Bn), dibenzyl (DiBz1 or Bn₂), or benzyloxycarbonyl (Cbz or Z)), N,N-dimethylglycine or creatine. For example, in some embodiments, an acyl moiety, such as, but not limited to, a formyl, acetyl (Ac), propanoyl, butanyl, heptanyl, hexanoyl, octanoyl, or nonanoyl, can be covalently linked to the N-terminal end of the peptide, which can prevent undesired side reactions during conjugation of the vehicle to the peptide. Other exemplary N-terminal derivative groups include —NRR¹ (other than —NH₂), —NRC(O)R¹, —NRC(O)OR¹, —NRS(O)₂R¹, —NHC(O)NHR¹, succinimide, or benzyloxycarbonyl-NH-(Cbz-NH—), wherein R and R¹ are each independently hydrogen or lower alkyl and wherein the phenyl ring may be substituted with 1 to 3 substituents selected from C₁-C₄ alkyl, C₁-C₄ alkoxy, chloro, and bromo.

[0533] In some embodiments, one or more peptidyl [—C(O)NR-] linkages (bonds) between amino acid residues can be replaced by a non-peptidyl linkage. Exemplary non-peptidyl linkages are —CH₂-carbamate [—CH₂—OC(O)NR—], phosphonate, —CH₂-sulfonamide [—CH₂—S(O)₂NR—], urea [—NHC(O)NH—], —CH₂-secondary amine, and alkylated peptide [—C(O)NR⁶— wherein R⁶ is lower alkyl].

[0534] In some embodiments, one or more individual amino acid residues can be derivatized. Various derivatizing agents are known to react specifically with selected sidechains or terminal residues, as described in detail below by way of example.

[0535] Lysinyl residues and amino terminal residues may be reacted with succinic or other carboxylic acid anhydrides, which reverse the charge of the lysinyl residues. Other suitable reagents for derivatizing alpha-amino-containing residues include imidoesters such as methyl picolinimidate; pyridoxal phosphate; pyridoxal; chloroborohydride; trinitrobenzenesulfonic acid; O-methylisourea; 2,4 pentanedione; and transaminase-catalyzed reaction with glyoxylate.

[0536] Arginyl residues may be modified by reaction with any one or combination of several conventional reagents, including phenylglyoxal, 2,3-butanedione, 1,2-cyclohexanedione, and ninhydrin. Derivatization of arginyl residues requires that the reaction be performed in alkaline conditions because of the high pKa of the guanidine functional group. Furthermore, these reagents may react with the groups of lysine as well as the arginine epsilon-amino group.

[0537] Specific modification of tyrosyl residues has been studied extensively, with particular interest in introducing spectral labels into tyrosyl residues by reaction with aromatic diazonium compounds or tetranitromethane. Most commonly, N-acetylimidizole and tetranitromethane are used to form O-acetyl tyrosyl species and 3-nitro derivatives, respectively.

[0538] Carboxyl sidechain groups (aspartyl or glutamyl) may be selectively modified by reaction with carbodiimides (R′—N═C═N—R′) such as 1-cyclohexyl-3-(2-morpholinyl-(4-ethyl) carbodiimide or 1-ethyl-3-(4-azonia-4,4-dimethylpentyl) carbodiimide. Furthermore, aspartyl and glutamyl residues may be converted to asparaginyl and glutaminyl residues by reaction with ammonium ions.

[0539] Glutaminyl and asparaginyl residues may be deamidated to the corresponding glutamyl and aspartyl residues. Alternatively, these residues are deamidated under mildly acidic conditions. Either form of these residues falls within the scope of this invention.

[0540] Cysteinyl residues can be replaced by amino acid residues or other moieties either to eliminate disulfide bonding or, conversely, to stabilize cross-linking. (See, e.g., Bhatnagar et al., J. Med. Chem., 39:3814-3819 (1996)).

[0541] Derivatization with bifunctional agents is useful for cross-linking the peptides or their functional derivatives to a water-insoluble support matrix, if desired, or to other macromolecular vehicles. Commonly used cross-linking agents include, e.g., 1,1-bis(diazoacetyl)-2-phenylethane, glutaraldehyde, N-hydroxysuccinimide esters, for example, esters with 4-azidosalicylic acid, homobifunctional imidoesters, including disuccinimidyl esters such as 3,3′-dithiobis(succinimidylpropionate), and bifunctional maleimides such as bis-N-maleimido-1,8-octane. Derivatizing agents such as methyl-3-[(p-azidophenyl)dithio]propioimidate yield photoactivatable intermediates that are capable of forming crosslinks in the presence of light. Alternatively, reactive water-insoluble matrices such as cyanogen bromide-activated carbohydrates and the reactive substrates, e.g., as described in U.S. Pat. Nos. 3,969,287; 3,691,016; 4,195,128; 4,247,642; 4,229,537; and 4,330,440, are employed for protein immobilization.

[0542] Other possible modifications include hydroxylation of proline and lysine, phosphorylation of hydroxyl groups of seryl or threonyl residues, oxidation of the sulfur atom in Cys, methylation of the alpha-amino groups of lysine, arginine, and histidine side chains. Creighton, Proteins: Structure and Molecule Properties (W. H. Freeman & Co., San Francisco), 79-86 (1983).

[0543] The above examples of derivatizations are not intended to be an exhaustive treatment, but merely illustrative.

[0544] The production of the composition of matter can also involve suitable protein purification techniques, when applicable. In some embodiments of the composition of matter of the invention, the molecule can be prepared to include a suitable isotopic label (e.g., ¹²⁵I, ¹⁴C, ¹³C, ³⁵S, ³H, ²H, ¹³N, ¹⁵N, ¹⁸O, ¹⁷O, etc.), for ease of quantification or detection.

[0545] Half-Life Extending Moieties.

[0546] Optionally, for modulation of the pharmacokinetic profile of the molecule to fit the therapeutic need, the composition of the present invention can include one or more half-life extending moieties of various masses and configurations, which half-life extending moiety, or moieties, can be covalently fused, attached, linked or conjugated to the toxin peptide analog. A “half-life extending moiety” refers to a molecule that prevents or mitigates in vivo degradation by proteolysis or other activity-diminishing chemical modification, increases in vivo half-life or other pharmacokinetic properties such as but not limited to increasing the rate of absorption, reduces toxicity, reduces immunogenicity, improves solubility, increases biological activity and/or target selectivity of the toxin peptide analog with respect to a target of interest, and/or increases manufacturability, compared to an unconjugated form of the toxin peptide analog. In accordance with the invention, the half-life extending moiety is one that is pharmaceutically acceptable.

[0547] The half-life extending moiety can be selected such that the inventive composition achieves a sufficient hydrodynamic size to prevent clearance by renal filtration in vivo. For example, a half-life extending moiety can be selected that is a polymeric macromolecule, which is substantially straight chain, branched-chain (br), or dendritic in form. Alternatively, a half-life extending moiety can be selected such that, in vivo, the inventive composition of matter will bind to a serum protein to form a complex, such that the complex thus formed avoids substantial renal clearance. The half-life extending moiety can be, for example, a lipid; a cholesterol group (such as a steroid); a carbohydrate or oligosaccharide; or any natural or synthetic protein, polypeptide or peptide that binds to a salvage receptor.

[0548] Exemplary half-life extending moieties that can be used, in accordance with the present invention, include an immunoglobulin Fc domain, or a portion thereof, or a biologically suitable polymer or copolymer, for example, a polyalkylene glycol compound, such as a polyethylene glycol (PEG) or a polypropylene glycol. Other appropriate polyalkylene glycol compounds include, but are not limited to, charged or neutral polymers of the following types: dextran, polylysine, colominic acids or other carbohydrate based polymers, polymers of amino acids, and biotin derivatives. In some monomeric fusion or conjugate protein embodiments an immunoglobulin (including light and heavy chains) or a portion thereof, can be used as a half-life-extending moiety, preferably an immunoglobulin of human origin, and including any of the immunoglobulins, such as, but not limited to, IgG1, IgG2, IgG3 or IgG4.

[0549] Other examples of the half-life extending moiety, in accordance with the invention, include a copolymer of ethylene glycol, a copolymer of propylene glycol, a carboxymethylcellulose, a polyvinyl pyrrolidone, a poly-1,3-dioxolane, a poly-1,3,6-trioxane, an ethylene maleic anhydride copolymer, a polyaminoacid (e.g., polylysine or polyornithine), a dextran n-vinyl pyrrolidone, a poly n-vinyl pyrrolidone, a propylene glycol homopolymer, a propylene oxide polymer, an ethylene oxide polymer, a polyoxyethylated polyol, a polyvinyl alcohol, a linear or branched glycosylated chain, a polyacetal, a long chain fatty acid, a long chain hydrophobic aliphatic group, or a polysialic acid (e.g., PolyXen™ technology; Gregoriadis et al., Improving the therapeutic efficacy of peptides and proteins: a role for polysialic acids, Intl. J. Pharmaceutics, 300:125-30 (2005), incorporated herein by reference in its entirety).

[0550] In other embodiments of the composition of matter, the half-life extending moiety is an anionically charged chemical entity, covalently linked to the N-terminus of the toxin peptide analog, which anionically charged chemical entities include, but are not limited to, phosphotyrosine, phosphoserine, p-phosphono(difluoro-methyl)-phenylalanine (Pfp), p-phosphono-methyl-phenylalanine (Pmp), p-phosphatidyl-phenylalanine (Ppa), or p-phosphono-methylketo-phenylalanine (Pkp), which can be covalently linked to the N-terminal of the toxin peptide analog, optionally indirectly, via an AEEA linker or other linker as described herein. (See, Chandy et al., Analogs of ShK toxin and their uses in selective inhibition of Kv1.3 potassium channels, WO 2006/042151 A2; Beeton et al., Targeting effector memory T cells with a selective peptide inhibitor of Kv1.3 channels for therapy of autoimmune diseases, Molec. Pharmacol. 67(4):1369-81 (2005); Pennington et al., Engineering a stable and selective peptide blocker of the Kv1.3 channel in T lymphocytes, Molecular Pharmacology Fast Forward, published Jan. 2, 2009 as doi:10.1124/mol.108.052704 (2009), all of which references are incorporated herein by reference in their entireties). AEEA is 2-(2-(2-aminoethoxy)ethoxy)acetic acid (also known as 8-Amino-3,6-Dioxaoctanoic Acid). (See, e.g., Beeton et al., Targeting effector memory T cells with a selective peptide inhibitor of Kv1.3 channels for therapy of autoimmune diseases, Molec. Pharmacol. 67(4):1369-81 (2005)).

[0551] Other embodiments of the half-life extending moiety, in accordance with the invention, include peptide ligands or small (organic) molecule ligands that have binding affinity for a long half-life serum protein under physiological conditions of temperature, pH, and ionic strength. Examples include an albumin-binding peptide or small molecule ligand, a transthyretin-binding peptide or small molecule ligand, a thyroxine-binding globulin-binding peptide or small molecule ligand, an antibody-binding peptide or small molecule ligand, or another peptide or small molecule that has an affinity for a long half-life serum protein, such as serum albumin. (See, e.g., Kratz, Albumin as a drug carrier: Design of prodrugs, drug conjugates and nanoparticles, Journal of Controlled Release 132:171-183 (2008); Dennis et al., Albumin binding as a general strategy for improving the pharmacokinetics of proteins, J. Biol. Chem. 277(38):35035-43 (2002); Knudsen et al., Potent derivative of glucagon-like Peptide-1 with pharmacokinetic properties suitable for once daily administration, J. Med. Chem. 43:1664-69 (2000); Kurtzhals et al., Albumin binding of insulins acylated with fatty acids: characterization of the ligand-protein interaction and correlation between binding affinity and timing of the insulin effect in vivo, Biochem. J. 312:725-31 (1995); Kenyon et al., 13C NMR Studies of the binding of medium-chain fatty acids to human serum albumin, J. Lipid Res. 35:458-67 (1994); Blaney et al., Method and compositions for increasing the serum half-life of pharmacologically active agents by binding to transthyretin-selective ligands, U.S. Pat. No. 5,714,142; Sato et al., Serum albumin binding moieties, US 2003/0069395 A1; Jones et al., Pharmaceutical active conjugates, U.S. Pat. No. 6,342,225). A “long half-life serum protein” is one of the hundreds of different proteins dissolved in mammalian blood plasma, including so-called “carrier proteins” (such as albumin, transferrin and haptoglobin), fibrinogen and other blood coagulation factors, complement components, immunoglobulins, enzyme inhibitors, precursors of substances such as angiotensin and bradykinin and many other types of proteins. The invention encompasses the use of any single species of pharmaceutically acceptable half-life extending moiety, such as, but not limited to, those described herein, or the use of a combination of two or more different half-life extending moieties, such as PEG and immunoglobulin Fc domain or a portion thereof (see, e.g., Feige et al., Modified peptides as therapeutic agents, U.S. Pat. No. 6,660,843), such as a CH2 domain of Fc, albumin (e.g., human serum albumin (HSA); see, e.g., Ehrlich et al., Preparation and characterization of albumin conjugates of a truncated Peptide YYY analogue for half-life extension, Bioconjugate Chemistry 24(12):2015-24 (2013); Rosen et al., Albumin fusion proteins, U.S. Pat. No. 6,926,898 and US 2005/0054051; Bridon et al., Protection of endogenous therapeutic peptides from peptidase activity through conjugation to blood components, U.S. Pat. No. 6,887,470), a transthyretin (TTR; see, e.g., Walker et al., Use of transthyretin peptide/protein fusions to increase the serum half-life of pharmacologically active peptides/proteins. US 2003/0195154 A1; 2003/0191056 A1), or a thyroxine-binding globulin (TBG), or a combination such as immunoglobulin(light chain+heavy chain) and Fc domain (the heterotrimeric combination a so-called “hemibody”), for example as described in Sullivan et al., Toxin Peptide Therapeutic Agents, PCT/US2007/022831, published as WO 2008/088422, which is incorporated herein by reference in its entirety.

[0552] Conjugation of the toxin peptide analogs(s) to the half-life extending moiety, or moieties, can be via the N-terminal and/or C-terminal of the toxin peptide, or can be intercalary as to its primary amino acid sequence, F1 being linked closer to the toxin peptide analog's N-terminus

[0553] Particularly useful half-life extending moieties include immunoglobulins (e.g., human immunoglobulin, including IgG1, IgG2, IgG3 or IgG4). The term “immunoglobulin” encompasses full antibodies comprising two dimerized heavy chains (HC), each covalently linked to a light chain (LC); a single undimerized immunoglobulin heavy chain and covalently linked light chain (HC+LC); or a chimeric immunoglobulin (light chain+heavy chain)-Fc heterotrimer (a so-called “hemibody”). FIGS. 94A-N illustrate several different embodiments of such immunoglobulin-toxin peptide conjugates.

[0554] Recombinant fusion or chemical conjugation of the inventive JzTx-V peptide analogs to a recombinant immunoglobulin of any of the IgG1, IgG2, IgG3 or IgG4 isotypes can be useful to extend pharmacokinetic half life. (See, e.g., Doellgast et al., WO 2010/108153 A2). Any of the carrier immunoglobulins disclosed in Doellgast et al., WO 2010/108153 A2 or Walker et al., PCT/US2011/052841, or isotype conversions of any of them comprising different isotype constant domains, or other carrier immunoglobulins known in the art, can be used as half life extending moieties within the scope of the invention. For example, aglycosylated (e.g., N297G variant IgG1; Dennis et al., Low affinity blood brain barrier receptor antibodies and uses thereof, WO 2012/075037 A1) and/or cysteine-substituted (“CysMab”) variant immunoglobulin monomers can also be employed for enhanced stability or modified effector function. (See, e.g., Table 5A below).

[0555] One example of a human IgG2 heavy chain (HC) constant domain has the amino acid sequence:

SEQ. ID NO: 533
ASTKGPSVFPLAPCSRSTSESTAALGCLVKDYFPEPVTVSWNSGALT
SGVHTFPAVLQSSGLYSLSSVVTVPSSNFGTQTYTCNVDHKPSNTKV
DKTVERKCCVECPPCPAPPVAGPSVFLFPPKPKDTLMISRTPEVTCV
VVDVSHEDPEVQFNWYVDGVEVHNAKTKPREEQFNSTFRVVSVLTVV
HQDWLNGKEYKCKVSNKGLPAPIEKTISKTKGQPREPQVYTLPPSRE
EMTKNQVSLTCLVKGFYPSDIAVEWESNGQPENNYKTTPPMLDSDGS
FFLYSKLTVDKSRWQQGNVFSCSVMHEALHNHYTQKSLSLSPGK//.

[0556] Constant region sequences of other IgG isotypes are known in the art for an IgG1, IgG2, IgG3, or IgG4 immunoglobulin isotype, if desired. In general, human IgG2 can be used for targets where effector functions are not desired, and human IgG1 in situations where such effector functions (e.g., antibody-dependent cytotoxicity (ADCC)) are desired. Human IgG3 has a relatively short half life and human IgG4 forms antibody “half-molecules.” There are four known allotypes of human IgG1. The preferred allotype is referred to as “hIgG1z”, also known as the “KEEM” allotype. Human IgG1 allotypes “hIgG1za” (KDEL), “hIgG1f” (REEM), and “hIgG1fa” are also useful; all appear to have ADCC effector function.

[0557] Human hIgG1z heavy chain (HC) constant domain has the amino acid sequence:

SEQ ID NO: 534
ASTKGPSVFPLAPSSKSTSGGTAALGCLVKDYFPEPVTVSWNSGALT
SGVHTFPAVLQSSGLYSLSSVVTVPSSSLGTQTYICNVNHKPSNTKV
DKKVEPKSCDKTHTCPPCPAPELLGGPSVFLFPPKPKDTLMISRTPE
VTCVVVDVSHEDPEVKFNWYVDGVEVHNAKTKPREEQYNSTYRVVSV
LTVLHQDWLNGKEYKCKVSNKALPAPIEKTISKAKGQPREPQVYTLP
PSREEMTKNQVSLTCLVKGFYPSDIAVEWESNGQPENNYKTTPPVLD
SDGSFFLYSKLTVDKSRWQQGNVFSCSVMHEALHNHYTQKSLSLSPG
K//.

[0558] Human hIgG1za heavy chain (HC) constant domain has the amino acid sequence:

SEQ ID NO: 535
ASTKGPSVFPLAPSSKSTSGGTAALGCLVKDYFPEPVTVSWNSGALT
SGVHTFPAVLQSSGLYSLSSVVTVPSSSLGTQTYICNVNHKPSNTKV
DKKVEPKSCDKTHTCPPCPAPELLGGPSVFLFPPKPKDTLMISRTPE
VTCVVVDVSHEDPEVKFNWYVDGVEVHNAKTKPREEQYNSTYRVVSV
LTVLHQDWLNGKEYKCKVSNKALPAPIEKTISKAKGQPREPQVYTLP
PSRDELTKNQVSLTCLVKGFYPSDIAVEWESNGQPENNYKTTPPVLD
SDGSFFLYSKLTVDKSRWQQGNVFSCSVMHEALHNHYTQKSLSLSPG
K//.

[0559] Human hIgG1f heavy chain (HC) constant domain has the amino acid sequence:

SEQ ID NO: 536
ASTKGPSVFPLAPSSKSTSGGTAALGCLVKDYFPEPVTVSWNSGALT
SGVHTFPAVLQSSGLYSLSSVVTVPSSSLGTQTYICNVNHKPSNTKV
DKRVEPKSCDKTHTCPPCPAPELLGGPSVFLFPPKPKDTLMISRTPE
VTCVVVDVSHEDPEVKFNWYVDGVEVHNAKTKPREEQYNSTYRVVSV
LTVLHQDWLNGKEYKCKVSNKALPAPIEKTISKAKGQPREPQVYTLP
PSREEMTKNQVSLTCLVKGFYPSDIAVEWESNGQPENNYKTTPPVLD
SDGSFFLYSKLTVDKSRWQQGNVFSCSVMHEALHNHYTQKSLSLSPG
K//.

[0560] Human hIgG1fa heavy chain (HC) constant domain has the amino acid sequence:

SEQ ID NO: 537
ASTKGPSVFPLAPSSKSTSGGTAALGCLVKDYFPEPVTVSWNSGALT
SGVHTFPAVLQSSGLYSLSSVVTVPSSSLGTQTYICNVNHKPSNTKV
DKRVEPKSCDKTHTCPPCPAPELLGGPSVFLFPPKPKDTLMISRTPE
VTCVVVDVSHEDPEVKFNWYVDGVEVHNAKTKPREEQYNSTYRVVSV
LTVLHQDWLNGKEYKCKVSNKALPAPIEKTISKAKGQPREPQVYTLP
PSRDELTKNQVSLTCLVKGFYPSDIAVEWESNGQPENNYKTTPPVLD
SDGSFFLYSKLTVDKSRWQQGNVFSCSVMHEALHNHYTQKSLSLSPG
K//.

[0561] One example of a human immunoglobulin light chain (LC) constant region sequence is the following (designated “CL-1”):

SEQ ID NO: 538
GQPKANPTVTLFPPSSEELQANKATLVCLISDFYPGAVTVAWKADGS
PVKAGVETTKPSKQSNNKYAASSYLSLTPEQWKSHRSYSCQVTHEGS
TVEKTVAPTECS//.

[0562] CL-1 is useful to increase the pI of antibodies and is convenient. There are three other human immunoglobulin light chain constant regions, designated “CL-2”, “CL-3” and “CL-7”, which can also be used within the scope of the present invention. CL-2 and CL-3 are more common in the human population.

[0563] CL-2 human light chain (LC) constant domain has the amino acid sequence:

SEQ ID NO: 539
GQPKAAPSVTLFPPSSEELQANKATLVCLISDFYPGAVTVAWKADSS
PVKAGVETTTPSKQSNNKYAASSYLSLTPEQWKSHRSYSCQVTHEGS
TVEKTVAPTECS//.

[0564] CL-3 human LC constant domain has the amino acid sequence:

SEQ ID NO: 540
GQPKAAPSVTLFPPSSEELQANKATLVCLISDFYPGAVTVAWKADSSP
VKAGVETTTPSKQSNNKYAASSYLSLTPEQWKSHKSYSCQVTHEGSTV
EKTVAPTECS//.

[0565] CL-7 human LC constant domain has the amino acid sequence:

SEQ ID NO: 541
GQPKAAPSVTLFPPSSEELQANKATLVCLVSDFYPGAVTVAWKADGSP
VKVGVETTKPSKQSNNKYAASSYLSLTPEQWKSHRSYSCRVTHEGSTV
EKTVAPAECS//.

TABLE 5A
Modified Human Immunoglobulin Light Chain,
Heavy Chain, and Fc Monomer Sequences that are Useful
Components for Half-life Extending Moieties.

| SEQ | | |
|---|---|---|
| ID | | |
| NO: | Designation | Amino Acid Sequence |
| 1695 | D70C, Light | EIVLTQSPGTLSLSPGERATLSCRASQGISRSELAWYQQKPGQAPSLLIY |
| | Chain | GASSRATGIPDRFSGSGSGTCFTLTISRLEPEDFAVYYCQQFGSSPWTFG |
| | sequence | QGTKVEIKRTVAAPSVFIFPPSDEQLKSGTASVVCLLNNFYPREAKVQWK |
| | | VDNALQSGNSQESVTEQDSKDSTYSLSSTLTLSKADYEKHKVYACEVTHQ |
| | | GLSSPVTKSFNRGEC |
| 1696 | V110C, Light | EIVLTQSPGTLSLSPGERATLSCRASQGISRSELAWYQQKPGQAPSLLIY |
| | Chain | GASSRATGIPDRFSGSGSGTDFTLTISRLEPEDFAVYYCQQFGSSPWTFG |
| | sequence | QGTKVEIKRTCAAPSVFIFPPSDEQLKSGTASVVCLLNNFYPREAKVQWK |
| | | VDNALQSGNSQESVTEQDSKDSTYSLSSTLTLSKADYEKHKVYACEVTHQ |
| | | GLSSPVTKSFNRGEC |
| 1697 | A112C, Light | EIVLTQSPGTLSLSPGERATLSCRASQGISRSELAWYQQKPGQAPSLLIY |
| | Chain | GASSRATGIPDRFSGSGSGTDFTLTISRLEPEDFAVYYCQQFGSSPWTFG |
| | sequence | QGTKVEIKRTVACPSVFIFPPSDEQLKSGTASVVCLLNNFYPREAKVQWK |
| | | VDNALQSGNSQESVTEQDSKDSTYSLSSTLTLSKADYEKHKVYACEVTHQ |
| | | GLSSPVTKSFNRGEC |
| 1698 | A89C, Light | EIVLTQSPGTLSLSPGERATLSCRASQGISRSELAWYQQKPGQAPSLLIY |
| | Chain | GASSRATGIPDRFSGSGSGTDFTLTISRLEPEDFAVYYCQQFGSSPWTFG |
| | sequence | QGTKVEIKRTVAAPSVFIFPPSDEQLKSGTASVVCLLNNFYPREAKVQWK |
| | | VDNALQSGNSQESVTEQDSKDSTYSLSSTLTLSKADYEKHKVYACEVTHQ |
| | | GLSSPVTKSFNRGEC |
| 1699 | A119C, Light | EIVLTQSPGTLSLSPGERATLSCRASQGISRSELAWYQQKPGQAPSLLIY |
| | Chain | GASSRATGIPDRFSGSGSGTDFTLTISRLEPEDFAVYYCQQFGSSPWTFG |
| | sequence | QGTKVEIKRTVAAPSVFIFPPSDEQLKSGTASVVCLLNNFYPREAKVQWK |
| | | VDNALQSGNSQESVTEQDSKDSTYSLSSTLTLSKADYEKHKVYACEVTHQ |
| | | GLSSPVTKSFNRGEC |
| 1700 | S125C, Light | EIVLTQSPGTLSLSPGERATLSCRASQGISRSELAWYQQKPGQAPSLLIY |
| | Chain | GASSRATGIPDRFSGSGSGTDFTLTISRLEPEDFAVYYCQQFGSSPWTFG |
| | sequence | QGTKVEIKRTVAAPSVFIFPPSDEQLKSGTASVVCLLNNFYPREAKVQWK |
| | | VDNALQSGNSQESVTEQDSKDSTYSLSSTLTLSKADYEKHKVYACEVTHQ |
| | | GLSSPVTKSFNRGEC |
| 1701 | E153C, Light | EIVLTQSPGTLSLSPGERATLSCRASQGISRSELAWYQQKPGQAPSLLIY |
| | Chain | GASSRATGIPDRFSGSGSGTDFTLTISRLEPEDFAVYYCQQFGSSPWTFG |
| | sequence | QGTKVEIKRTVAAPSVFIFPPSDEQLKSGTASVVCLLNNFYPREAKVQWK |
| | | VDNALQSGNSQESVTEQDSKDSTYSLSSTLTLSKADYEKHKVYACEVTHQ |
| | | GLSSPVTKSFNRGEC |
| 1702 | D266C, Light | EIVLTQSPGTLSLSPGERATLSCRASQGISRSELAWYQQKPGQAPSLLIY |
| | Chain | GASSRATGIPDRFSGSGSGTDFTLTISRLEPEDFAVYYCQQFGSSPWTFG |
| | sequence | QGTKVEIKRTVAAPSVFIFPPSDEQLKSGTASVVCLLNNFYPREAKVQWK |
| | | VDNALQSGNSQESVTEQDSKDSTYSLSSTLTLSKADYEKHKVYACEVTHQ |
| | | GLSSPVTKSFNRGEC |
| 1703 | E273C, Light | EIVLTQSPGTLSLSPGERATLSCRASQGISRSELAWYQQKPGQAPSLLIY |
| | Chain | GASSRATGIPDRFSGSGSGTDFTLTISRLEPEDFAVYYCQQFGSSPWTFG |
| | sequence | QGTKVEIKRTVAAPSVFIFPPSDEQLKSGTASVVCLLNNFYPREAKVQWK |
| | | VDNALQSGNSQESVTEQDSKDSTYSLSSTLTLSKADYEKHKVYACEVTHQ |
| | | GLSSPVTKSFNRGEC |
| 1704 | Y301C, Light | EIVLTQSPGTLSLSPGERATLSCRASQGISRSELAWYQQKPGQAPSLLIY |
| | Chain | GASSRATGIPDRFSGSGSGTDFTLTISRLEPEDFAVYYCQQFGSSPWTFG |
| | sequence | QGTKVEIKRTVAAPSVFIFPPSDEQLKSGTASVVCLLNNFYPREAKVQWK |
| | | VDNALQSGNSQESVTEQDSKDSTYSLSSTLTLSKADYEKHKVYACEVTHQ |
| | | GLSSPVTKSFNRGEC |
| 1705 | E346C, Light | EIVLTQSPGTLSLSPGERATLSCRASQGISRSELAWYQQKPGQAPSLLIY |
| | Chain | GASSRATGIPDRFSGSGSGTDFTLTISRLEPEDFAVYYCQQFGSSPWTFG |
| | sequence | QGTKVEIKRTVAAPSVFIFPPSDEQLKSGTASVVCLLNNFYPREAKVQWK |
| | | VDNALQSGNSQESVTEQDSKDSTYSLSSTLTLSKADYEKHKVYACEVTHQ |
| | | GLSSPVTKSFNRGEC |
| 1706 | M359C, Light | EIVLTQSPGTLSLSPGERATLSCRASQGISRSELAWYQQKPGQAPSLLIY |
| | Chain | GASSRATGIPDRFSGSGSGTDFTLTISRLEPEDFAVYYCQQFGSSPWTFG |
| | sequence | QGTKVEIKRTVAAPSVFIFPPSDEQLKSGTASVVCLLNNFYPREAKVQWK |
| | | VDNALQSGNSQESVTEQDSKDSTYSLSSTLTLSKADYEKHKVYACEVTHQ |
| | | GLSSPVTKSFNRGEC |
| 1707 | T360C, Light | EIVLTQSPGTLSLSPGERATLSCRASQGISRSELAWYQQKPGQAPSLLIY |
| | Chain | GASSRATGIPDRFSGSGSGTDFTLTISRLEPEDFAVYYCQQFGSSPWTFG |
| | sequence | QGTKVEIKRTVAAPSVFIFPPSDEQLKSGTASVVCLLNNFYPREAKVQWK |
| | | VDNALQSGNSQESVTEQDSKDSTYSLSSTLTLSKADYEKHKVYACEVTHQ |
| | | GLSSPVTKSFNRGEC |
| 1708 | N362C, Light | EIVLTQSPGTLSLSPGERATLSCRASQGISRSELAWYQQKPGQAPSLLIY |
| | Chain | GASSRATGIPDRFSGSGSGTDFTLTISRLEPEDFAVYYCQQFGSSPWTFG |
| | sequence | QGTKVEIKRTVAAPSVFIFPPSDEQLKSGTASVVCLLNNFYPREAKVQWK |
| | | VDNALQSGNSQESVTEQDSKDSTYSLSSTLTLSKADYEKHKVYACEVTHQ |
| | | GLSSPVTKSFNRGEC |
| 1709 | Q363C, Light | EIVLTQSPGTLSLSPGERATLSCRASQGISRSELAWYQQKPGQAPSLLIY |
| | Chain | GASSRATGIPDRFSGSGSGTDFTLTISRLEPEDFAVYYCQQFGSSPWTFG |
| | sequence | QGTKVEIKRTVAAPSVFIFPPSDEQLKSGTASVVCLLNNFYPREAKVQWK |
| | | VDNALQSGNSQESVTEQDSKDSTYSLSSTLTLSKADYEKHKVYACEVTHQ |
| | | GLSSPVTKSFNRGEC |
| 1710 | E389C, Light | EIVLTQSPGTLSLSPGERATLSCRASQGISRSELAWYQQKPGQAPSLLIY |
| | Chain | GASSRATGIPDRFSGSGSGTDFTLTISRLEPEDFAVYYCQQFGSSPWTFG |
| | sequence | QGTKVEIKRTVAAPSVFIFPPSDEQLKSGTASVVCLLNNFYPREAKVQWK |
| | | VDNALQSGNSQESVTEQDSKDSTYSLSSTLTLSKADYEKHKVYACEVTHQ |
| | | GLSSPVTKSFNRGEC |
| 1711 | N391C, Light | EIVLTQSPGTLSLSPGERATLSCRASQGISRSELAWYQQKPGQAPSLLIY |
| | Chain | GASSRATGIPDRFSGSGSGTDFTLTISRLEPEDFAVYYCQQFGSSPWTFG |
| | sequence | QGTKVEIKRTVAAPSVFIFPPSDEQLKSGTASVVCLLNNFYPREAKVQWK |
| | | VDNALQSGNSQESVTEQDSKDSTYSLSSTLTLSKADYEKHKVYACEVTHQ |
| | | GLSSPVTKSFNRGEC |
| 1712 | D414C, Light | EIVLTQSPGTLSLSPGERATLSCRASQGISRSELAWYQQKPGQAPSLLIY |
| | Chain | GASSRATGIPDRFSGSGSGTDFTLTISRLEPEDFAVYYCQQFGSSPWTFG |
| | sequence | QGTKVEIKRTVAAPSVFIFPPSDEQLKSGTASVVCLLNNFYPREAKVQWK |
| | | VDNALQSGNSQESVTEQDSKDSTYSLSSTLTLSKADYEKHKVYACEVTHQ |
| | | GLSSPVTKSFNRGEC |
| 1713 | S416C, Light | EIVLTQSPGTLSLSPGERATLSCRASQGISRSELAWYQQKPGQAPSLLIY |
| | Chain | GASSRATGIPDRFSGSGSGTDFTLTISRLEPEDFAVYYCQQFGSSPWTFG |
| | sequence | QGTKVEIKRTVAAPSVFIFPPSDEQLKSGTASVVCLLNNFYPREAKVQWK |
| | | VDNALQSGNSQESVTEQDSKDSTYSLSSTLTLSKADYEKHKVYACEVTHQ |
| | | GLSSPVTKSFNRGEC |
| 1714 | S443C, Light | EIVLTQSPGTLSLSPGERATLSCRASQGISRSELAWYQQKPGQAPSLLIY |
| | Chain | GASSRATGIPDRFSGSGSGTDFTLTISRLEPEDFAVYYCQQFGSSPWTFG |
| | sequence | QGTKVEIKRTVAAPSVFIFPPSDEQLKSGTASVVCLLNNFYPREAKVQWK |
| | | VDNALQSGNSQESVTEQDSKDSTYSLSSTLTLSKADYEKHKVYACEVTHQ |
| | | GLSSPVTKSFNRGEC |
| 1715 | D70C, Heavy | QVQLQESGPGLVKPSQTLSLTCTVSGGSISSGDYFWSWIRQLPGKGLEWI |
| | Chain | GHIHNSGTTYYNPSLKSRVTISVDTSKKQFSLRLSSVTAADTAVYYCARD |
| | sequence | RGGDYAYGMDVWGQGTTVTVSSASTKGPSVFPLAPSSKSTSGGTAALGCL |
| | | VKDYFPEPVTVSWNSGALTSGVHTFPAVLQSSGLYSLSSVVTVPSSSLGT |
| | | QTYICNVNHKPSNTKVDKRVEPKSCDKTHTCPPCPAPELLGGPSVFLFPP |
| | | KPKDTLMISRTPEVTCVVVDVSHEDPEVKFNWYVDGVEVHNAKTKPREEQ |
| | | YGSTYRVVSVLTVLHQDWLNGKEYKCKVSNKALPAPIEKTISKAKGQPRE |
| | | PQVYTLPPSREEMTKNQVSLTCLVKGFYPSDIAVEWESNGQPENNYKTTP |
| | | PVLDSDGSFFLYSKLTVDKSRWQQGNVFSCSVMHEALHNHYTQKSLSLSP |
| | | GK |
| 1716 | V110C, | QVQLQESGPGLVKPSQTLSLTCTVSGGSISSGDYFWSWIRQLPGKGLEWI |
| | Heavy Chain | GHIHNSGTTYYNPSLKSRVTISVDTSKKQFSLRLSSVTAADTAVYYCARD |
| | sequence | RGGDYAYGMDVWGQGTTVTVSSASTKGPSVFPLAPSSKSTSGGTAALGCL |
| | | VKDYFPEPVTVSWNSGALTSGVHTFPAVLQSSGLYSLSSVVTVPSSSLGT |
| | | QTYICNVNHKPSNTKVDKRVEPKSCDKTHTCPPCPAPELLGGPSVFLFPP |
| | | KPKDTLMISRTPEVTCVVVDVSHEDPEVKFNWYVDGVEVHNAKTKPREEQ |
| | | YGSTYRVVSVLTVLHQDWLNGKEYKCKVSNKALPAPIEKTISKAKGQPRE |
| | | PQVYTLPPSREEMTKNQVSLTCLVKGFYPSDIAVEWESNGQPENNYKTTP |
| | | PVLDSDGSFFLYSKLTVDKSRWQQGNVFSCSVMHEALHNHYTQKSLSLSP |
| | | GK |
| 1717 | A112C, | QVQLQESGPGLVKPSQTLSLTCTVSGGSISSGDYFWSWIRQLPGKGLEWI |
| | Heavy Chain | GHIHNSGTTYYNPSLKSRVTISVDTSKKQFSLRLSSVTAADTAVYYCARD |
| | sequence | RGGDYAYGMDVWGQGTTVTVSSASTKGPSVFPLAPSSKSTSGGTAALGCL |
| | | VKDYFPEPVTVSWNSGALTSGVHTFPAVLQSSGLYSLSSVVTVPSSSLGT |
| | | QTYICNVNHKPSNTKVDKRVEPKSCDKTHTCPPCPAPELLGGPSVFLFPP |
| | | KPKDTLMISRTPEVTCVVVDVSHEDPEVKFNWYVDGVEVHNAKTKPREEQ |
| | | YGSTYRVVSVLTVLHQDWLNGKEYKCKVSNKALPAPIEKTISKAKGQPRE |
| | | PQVYTLPPSREEMTKNQVSLTCLVKGFYPSDIAVEWESNGQPENNYKTTP |
| | | PVLDSDGSFFLYSKLTVDKSRWQQGNVFSCSVMHEALHNHYTQKSLSLSP |
| | | GK |
| 1718 | A89C, Heavy | QVQLQESGPGLVKPSQTLSLTCTVSGGSISSGDYFWSWIRQLPGKGLEWI |
| | Chain | GHIHNSGTTYYNPSLKSRVTISVDTSKKQFSLRLSSVTACDTAVYYCARD |
| | sequence | RGGDYAYGMDVWGQGTTVTVSSASTKGPSVFPLAPSSKSTSGGTAALGCL |
| | | VKDYFPEPVTVSWNSGALTSGVHTFPAVLQSSGLYSLSSVVTVPSSSLGT |
| | | QTYICNVNHKPSNTKVDKRVEPKSCDKTHTCPPCPAPELLGGPSVFLFPP |
| | | KPKDTLMISRTPEVTCVVVDVSHEDPEVKFNWYVDGVEVHNAKTKPREEQ |
| | | YGSTYRVVSVLTVLHQDWLNGKEYKCKVSNKALPAPIEKTISKAKGQPRE |
| | | PQVYTLPPSREEMTKNQVSLTCLVKGFYPSDIAVEWESNGQPENNYKTTP |
| | | PVLDSDGSFFLYSKLTVDKSRWQQGNVFSCSVMHEALHNHYTQKSLSLSP |
| | | GK |
| 1719 | A119C, | QVQLQESGPGLVKPSQTLSLTCTVSGGSISSGDYFWSWIRQLPGKGLEWI |
| | Heavy Chain | GHIHNSGTTYYNPSLKSRVTISVDTSKKQFSLRLSSVTAADTAVYYCARD |
| | sequence | RGGDYAYGMDVWGQGTTVTVSSCSTKGPSVFPLAPSSKSTSGGTAALGCL |
| | | VKDYFPEPVTVSWNSGALTSGVHTFPAVLQSSGLYSLSSVVTVPSSSLGT |
| | | QTYICNVNHKPSNTKVDKRVEPKSCDKTHTCPPCPAPELLGGPSVFLFPP |
| | | KPKDTLMISRTPEVTCVVVDVSHEDPEVKFNWYVDGVEVHNAKTKPREEQ |
| | | YGSTYRVVSVLTVLHQDWLNGKEYKCKVSNKALPAPIEKTISKAKGQPRE |
| | | PQVYTLPPSREEMTKNQVSLTCLVKGFYPSDIAVEWESNGQPENNYKTTP |
| | | PVLDSDGSFFLYSKLTVDKSRWQQGNVFSCSVMHEALHNHYTQKSLSLSP |
| | | GK |
| 1720 | S125C, Heavy | QVQLQESGPGLVKPSQTLSLTCTVSGGSISSGDYFWSWIRQLPGKGLEWI |
| | Chain | GHIHNSGTTYYNPSLKSRVTISVDTSKKQFSLRLSSVTAADTAVYYCARD |
| | sequence | RGGDYAYGMDVWGQGTTVTVSSASTKGPCVFPLAPSSKSTSGGTAALGCL |
| | | VKDYFPEPVTVSWNSGALTSGVHTFPAVLQSSGLYSLSSVVTVPSSSLGT |
| | | QTYICNVNHKPSNTKVDKRVEPKSCDKTHTCPPCPAPELLGGPSVFLFPP |
| | | KPKDTLMISRTPEVTCVVVDVSHEDPEVKFNWYVDGVEVHNAKTKPREEQ |
| | | YGSTYRVVSVLTVLHQDWLNGKEYKCKVSNKALPAPIEKTISKAKGQPRE |
| | | PQVYTLPPSREEMTKNQVSLTCLVKGFYPSDIAVEWESNGQPENNYKTTP |
| | | PVLDSDGSFFLYSKLTVDKSRWQQGNVFSCSVMHEALHNHYTQKSLSLSP |
| | | GK |
| 1721 | E153C, Heavy | QVQLQESGPGLVKPSQTLSLTCTVSGGSISSGDYFWSWIRQLPGKGLEWI |
| | Chain | GHIHNSGTTYYNPSLKSRVTISVDTSKKQFSLRLSSVTAADTAVYYCARD |
| | sequence | RGGDYAYGMDVWGQGTTVTVSSASTKGPSVFPLAPSSKSTSGGTAALGCL |
| | | VKDYFPCPVTVSWNSGALTSGVHTFPAVLQSSGLYSLSSVVTVPSSSLGT |
| | | QTYICNVNHKPSNTKVDKRVEPKSCDKTHTCPPCPAPELLGGPSVFLFPP |
| | | KPKDTLMISRTPEVTCVVVDVSHEDPEVKFNWYVDGVEVHNAKTKPREEQ |
| | | YGSTYRVVSVLTVLHQDWLNGKEYKCKVSNKALPAPIEKTISKAKGQPRE |
| | | PQVYTLPPSREEMTKNQVSLTCLVKGFYPSDIAVEWESNGQPENNYKTTP |
| | | PVLDSDGSFFLYSKLTVDKSRWQQGNVFSCSVMHEALHNHYTQKSLSLSP |
| | | GK |
| 1722 | D266C, | QVQLQESGPGLVKPSQTLSLTCTVSGGSISSGDYFWSWIRQLPGKGLEWI |
| | Heavy Chain | GHIHNSGTTYYNPSLKSRVTISVDTSKKQFSLRLSSVTAADTAVYYCARD |
| | sequence | RGGDYAYGMDVWGQGTTVTVSSASTKGPSVFPLAPSSKSTSGGTAALGCL |
| | | VKDYFPEPVTVSWNSGALTSGVHTFPAVLQSSGLYSLSSVVTVPSSSLGT |
| | | QTYICNVNHKPSNTKVDKRVEPKSCDKTHTCPPCPAPELLGGPSVFLFPP |
| | | KPKDTLMISRTPEVTCVVVCVSHEDPEVKFNWYVDGVEVHNAKTKPREEQ |
| | | YGSTYRVVSVLTVLHQDWLNGKEYKCKVSNKALPAPIEKTISKAKGQPRE |
| | | PQVYTLPPSREEMTKNQVSLTCLVKGFYPSDIAVEWESNGQPENNYKTTP |
| | | PVLDSDGSFFLYSKLTVDKSRWQQGNVFSCSVMHEALHNHYTQKSLSLSP |
| | | GK |
| 1723 | E273C, Heavy | QVQLQESGPGLVKPSQTLSLTCTVSGGSISSGDYFWSWIRQLPGKGLEWI |
| | Chain | GHIHNSGTTYYNPSLKSRVTISVDTSKKQFSLRLSSVTAADTAVYYCARD |
| | sequence | RGGDYAYGMDVWGQGTTVTVSSASTKGPSVFPLAPSSKSTSGGTAALGCL |
| | | VKDYFPEPVTVSWNSGALTSGVHTFPAVLQSSGLYSLSSVVTVPSSSLGT |
| | | QTYICNVNHKPSNTKVDKRVEPKSCDKTHTCPPCPAPELLGGPSVFLFPP |
| | | KPKDTLMISRTPEVTCVVVDVSHEDPCVKFNWYVDGVEVHNAKTKPREEQ |
| | | YGSTYRVVSVLTVLHQDWLNGKEYKCKVSNKALPAPIEKTISKAKGQPRE |
| | | PQVYTLPPSREEMTKNQVSLTCLVKGFYPSDIAVEWESNGQPENNYKTTP |
| | | PVLDSDGSFFLYSKLTVDKSRWQQGNVFSCSVMHEALHNHYTQKSLSLSP |
| | | GK |
| 1724 | Y301C, Heavy | QVQLQESGPGLVKPSQTLSLTCTVSGGSISSGDYFWSWIRQLPGKGLEWI |
| | Chain | GHIHNSGTTYYNPSLKSRVTISVDTSKKQFSLRLSSVTAADTAVYYCARD |
| | sequence | RGGDYAYGMDVWGQGTTVTVSSASTKGPSVFPLAPSSKSTSGGTAALGCL |
| | | VKDYFPEPVTVSWNSGALTSGVHTFPAVLQSSGLYSLSSVVTVPSSSLGT |
| | | QTYICNVNHKPSNTKVDKRVEPKSCDKTHTCPPCPAPELLGGPSVFLFPP |
| | | KPKDTLMISRTPEVTCVVVDVSHEDPEVKFNWYVDGVEVHNAKTKPREEQ |
| | | YGSTCRVVSVLTVLHQDWLNGKEYKCKVSNKALPAPIEKTISKAKGQPRE |
| | | PQVYTLPPSREEMTKNQVSLTCLVKGFYPSDIAVEWESNGQPENNYKTTP |
| | | PVLDSDGSFFLYSKLTVDKSRWQQGNVFSCSVMHEALHNHYTQKSLSLSP |
| | | GK |
| 1725 | E346C, Heavy | QVQLQESGPGLVKPSQTLSLTCTVSGGSISSGDYFWSWIRQLPGKGLEWI |
| | Chain | GHIHNSGTTYYNPSLKSRVTISVDTSKKQFSLRLSSVTAADTAVYYCARD |
| | sequence | RGGDYAYGMDVWGQGTTVTVSSASTKGPSVFPLAPSSKSTSGGTAALGCL |
| | | VKDYFPEPVTVSWNSGALTSGVHTFPAVLQSSGLYSLSSVVTVPSSSLGT |
| | | QTYICNVNHKPSNTKVDKRVEPKSCDKTHTCPPCPAPELLGGPSVFLFPP |
| | | KPKDTLMISRTPEVTCVVVDVSHEDPEVKFNWYVDGVEVHNAKTKPREEQ |
| | | YGSTYRVVSVLTVLHQDWLNGKEYKCKVSNKALPAPIEKTISKAKGQPRC |
| | | PQVYTLPPSREEMTKNQVSLTCLVKGFYPSDIAVEWESNGQPENNYKTTP |
| | | PVLDSDGSFFLYSKLTVDKSRWQQGNVFSCSVMHEALHNHYTQKSLSLSP |
| | | GK |
| 1726 | M359C, | QVQLQESGPGLVKPSQTLSLTCTVSGGSISSGDYFWSWIRQLPGKGLEWI |
| | Heavy Chain | GHIHNSGTTYYNPSLKSRVTISVDTSKKQFSLRLSSVTAADTAVYYCARD |
| | sequence | RGGDYAYGMDVWGQGTTVTVSSASTKGPSVFPLAPSSKSTSGGTAALGCL |
| | | VKDYFPEPVTVSWNSGALTSGVHTFPAVLQSSGLYSLSSVVTVPSSSLGT |
| | | QTYICNVNHKPSNTKVDKRVEPKSCDKTHTCPPCPAPELLGGPSVFLFPP |
| | | KPKDTLMISRTPEVTCVVVDVSHEDPEVKFNWYVDGVEVHNAKTKPREEQ |
| | | YGSTYRVVSVLTVLHQDWLNGKEYKCKVSNKALPAPIEKTISKAKGQPRE |
| | | PQVYTLPPSREECTKNQVSLTCLVKGFYPSDIAVEWESNGQPENNYKTTP |
| | | PVLDSDGSFFLYSKLTVDKSRWQQGNVFSCSVMHEALHNHYTQKSLSLSP |
| | | GK |
| 1727 | T360C, Heavy | QVQLQESGPGLVKPSQTLSLTCTVSGGSISSGDYFWSWIRQLPGKGLEWI |
| | Chain | GHIHNSGTTYYNPSLKSRVTISVDTSKKQFSLRLSSVTAADTAVYYCARD |
| | sequence | RGGDYAYGMDVWGQGTTVTVSSASTKGPSVFPLAPSSKSTSGGTAALGCL |
| | | VKDYFPEPVTVSWNSGALTSGVHTFPAVLQSSGLYSLSSVVTVPSSSLGT |
| | | QTYICNVNHKPSNTKVDKRVEPKSCDKTHTCPPCPAPELLGGPSVFLFPP |
| | | KPKDTLMISRTPEVTCVVVDVSHEDPEVKFNWYVDGVEVHNAKTKPREEQ |
| | | YGSTYRVVSVLTVLHQDWLNGKEYKCKVSNKALPAPIEKTISKAKGQPRE |
| | | PQVYTLPPSREEMCKNQVSLTCLVKGFYPSDIAVEWESNGQPENNYKTTP |
| | | PVLDSDGSFFLYSKLTVDKSRWQQGNVFSCSVMHEALHNHYTQKSLSLSP |
| | | GK |
| 1728 | N362C, | QVQLQESGPGLVKPSQTLSLTCTVSGGSISSGDYFWSWIRQLPGKGLEWI |
| | Heavy Chain | GHIHNSGTTYYNPSLKSRVTISVDTSKKQFSLRLSSVTAADTAVYYCARD |
| | sequence | RGGDYAYGMDVWGQGTTVTVSSASTKGPSVFPLAPSSKSTSGGTAALGCL |
| | | VKDYFPEPVTVSWNSGALTSGVHTFPAVLQSSGLYSLSSVVTVPSSSLGT |
| | | QTYICNVNHKPSNTKVDKRVEPKSCDKTHTCPPCPAPELLGGPSVFLFPP |
| | | KPKDTLMISRTPEVTCVVVDVSHEDPEVKFNWYVDGVEVHNAKTKPREEQ |
| | | YGSTYRVVSVLTVLHQDWLNGKEYKCKVSNKALPAPIEKTISKAKGQPRE |
| | | PQVYTLPPSREEMTKCQVSLTCLVKGFYPSDIAVEWESNGQPENNYKTTP |
| | | PVLDSDGSFFLYSKLTVDKSRWQQGNVFSCSVMHEALHNHYTQKSLSLSP |
| | | GK |
| 1729 | Q363C, | QVQLQESGPGLVKPSQTLSLTCTVSGGSISSGDYFWSWIRQLPGKGLEWI |
| | Heavy Chain | GHIHNSGTTYYNPSLKSRVTISVDTSKKQFSLRLSSVTAADTAVYYCARD |
| | sequence | RGGDYAYGMDVWGQGTTVTVSSASTKGPSVFPLAPSSKSTSGGTAALGCL |
| | | VKDYFPEPVTVSWNSGALTSGVHTFPAVLQSSGLYSLSSVVTVPSSSLGT |
| | | QTYICNVNHKPSNTKVDKRVEPKSCDKTHTCPPCPAPELLGGPSVFLFPP |
| | | KPKDTLMISRTPEVTCVVVDVSHEDPEVKFNWYVDGVEVHNAKTKPREEQ |
| | | YGSTYRVVSVLTVLHQDWLNGKEYKCKVSNKALPAPIEKTISKAKGQPRE |
| | | PQVYTLPPSREEMTKNCVSLTCLVKGFYPSDIAVEWESNGQPENNYKTTP |
| | | PVLDSDGSFFLYSKLTVDKSRWQQGNVFSCSVMHEALHNHYTQKSLSLSP |
| | | GK |
| 1730 | E389C, Heavy | QVQLQESGPGLVKPSQTLSLTCTVSGGSISSGDYFWSWIRQLPGKGLEWI |
| | Chain | GHIHNSGTTYYNPSLKSRVTISVDTSKKQFSLRLSSVTAADTAVYYCARD |
| | sequence | RGGDYAYGMDVWGQGTTVTVSSASTKGPSVFPLAPSSKSTSGGTAALGCL |
| | | VKDYFPEPVTVSWNSGALTSGVHTFPAVLQSSGLYSLSSVVTVPSSSLGT |
| | | QTYICNVNHKPSNTKVDKRVEPKSCDKTHTCPPCPAPELLGGPSVFLFPP |
| | | KPKDTLMISRTPEVTCVVVDVSHEDPEVKFNWYVDGVEVHNAKTKPREEQ |
| | | YGSTYRVVSVLTVLHQDWLNGKEYKCKVSNKALPAPIEKTISKAKGQPRE |
| | | PQVYTLPPSREEMTKNQVSLTCLVKGFYPSDIAVEWESNGQPCNNYKTTP |
| | | PVLDSDGSFFLYSKLTVDKSRWQQGNVFSCSVMHEALHNHYTQKSLSLSP |
| | | GK |
| 1731 | N391C, | QVQLQESGPGLVKPSQTLSLTCTVSGGSISSGDYFWSWIRQLPGKGLEWI |
| | Heavy Chain | GHIHNSGTTYYNPSLKSRVTISVDTSKKQFSLRLSSVTAADTAVYYCARD |
| | sequence | RGGDYAYGMDVWGQGTTVTVSSASTKGPSVFPLAPSSKSTSGGTAALGCL |
| | | VKDYFPEPVTVSWNSGALTSGVHTFPAVLQSSGLYSLSSVVTVPSSSLGT |
| | | QTYICNVNHKPSNTKVDKRVEPKSCDKTHTCPPCPAPELLGGPSVFLFPP |
| | | KPKDTLMISRTPEVTCVVVDVSHEDPEVKFNWYVDGVEVHNAKTKPREEQ |
| | | YGSTYRVVSVLTVLHQDWLNGKEYKCKVSNKALPAPIEKTISKAKGQPRE |
| | | PQVYTLPPSREEMTKNQVSLTCLVKGFYPSDIAVEWESNGQPENCYKTTP |
| | | PVLDSDGSFFLYSKLTVDKSRWQQGNVFSCSVMHEALHNHYTQKSLSLSP |
| | | GK |
| 1732 | D414C, | QVQLQESGPGLVKPSQTLSLTCTVSGGSISSGDYFWSWIRQLPGKGLEWI |
| | Heavy Chain | GHIHNSGTTYYNPSLKSRVTISVDTSKKQFSLRLSSVTAADTAVYYCARD |
| | sequence | RGGDYAYGMDVWGQGTTVTVSSASTKGPSVFPLAPSSKSTSGGTAALGCL |
| | | VKDYFPEPVTVSWNSGALTSGVHTFPAVLQSSGLYSLSSVVTVPSSSLGT |
| | | QTYICNVNHKPSNTKVDKRVEPKSCDKTHTCPPCPAPELLGGPSVFLFPP |
| | | KPKDTLMISRTPEVTCVVVDVSHEDPEVKFNWYVDGVEVHNAKTKPREEQ |
| | | YGSTYRVVSVLTVLHQDWLNGKEYKCKVSNKALPAPIEKTISKAKGQPRE |
| | | PQVYTLPPSREEMTKNQVSLTCLVKGFYPSDIAVEWESNGQPENNYKTTP |
| | | PVLDSDGSFFLYSKLTVCKSRWQQGNVFSCSVMHEALHNHYTQKSLSLSP |
| | | GK |
| 1733 | S416C, Heavy | QVQLQESGPGLVKPSQTLSLTCTVSGGSISSGDYFWSWIRQLPGKGLEWI |
| | Chain | GHIHNSGTTYYNPSLKSRVTISVDTSKKQFSLRLSSVTAADTAVYYCARD |
| | sequence | RGGDYAYGMDVWGQGTTVTVSSASTKGPSVFPLAPSSKSTSGGTAALGCL |
| | | VKDYFPEPVTVSWNSGALTSGVHTFPAVLQSSGLYSLSSVVTVPSSSLGT |
| | | QTYICNVNHKPSNTKVDKRVEPKSCDKTHTCPPCPAPELLGGPSVFLFPP |
| | | KPKDTLMISRTPEVTCVVVDVSHEDPEVKFNWYVDGVEVHNAKTKPREEQ |
| | | YGSTYRVVSVLTVLHQDWLNGKEYKCKVSNKALPAPIEKTISKAKGQPRE |
| | | PQVYTLPPSREEMTKNQVSLTCLVKGFYPSDIAVEWESNGQPENNYKTTP |
| | | PVLDSDGSFFLYSKLTVDKCRWQQGNVFSCSVMHEALHNHYTQKSLSLSP |
| | | GK |
| 1734 | S443C, Heavy | QVQLQESGPGLVKPSQTLSLTCTVSGGSISSGDYFWSWIRQLPGKGLEWI |
| | Chain | GHIHNSGTTYYNPSLKSRVTISVDTSKKQFSLRLSSVTAADTAVYYCARD |
| | sequence | RGGDYAYGMDVWGQGTTVTVSSASTKGPSVFPLAPSSKSTSGGTAALGCL |
| | | VKDYFPEPVTVSWNSGALTSGVHTFPAVLQSSGLYSLSSVVTVPSSSLGT |
| | | QTYICNVNHKPSNTKVDKRVEPKSCDKTHTCPPCPAPELLGGPSVFLFPP |
| | | KPKDTLMISRTPEVTCVVVDVSHEDPEVKFNWYVDGVEVHNAKTKPREEQ |
| | | YGSTYRVVSVLTVLHQDWLNGKEYKCKVSNKALPAPIEKTISKAKGQPRE |
| | | PQVYTLPPSREEMTKNQVSLTCLVKGFYPSDIAVEWESNGQPENNYKTTP |
| | | PVLDSDGSFFLYSKLTVDKSRWQQGNVFSCSVMHEALHNHYTQKSLCLSP |
| | | GK |
| 1735 | hu Fc SEFL | DKTHTCPPCPAPELLGGPSVFLFPPKPKDTLMISRTPEVTCVVVDVSHED |
| | E346C | PEVKFNWYVDGVEVHNAKTKPREEQYGSTYRVVSVLTVLHQDWLNGKEYK |
| | | CKVSNKALPAPIEKTISKAKGQPRCPQVYTLPPSREEMTKNQVSLTCLVK |
| | | GFYPSDIAVEWESNGQPENNYKTTPPVLDSDGSFFLYSKLTVDKSRWQQG |
| | | NVFSCSVMHEALHNHYTQKSLSLSPGK |
| 1736 | hu Fc SEFL | DKTHTCPPCPAPELLGGPSVFLFPPKPKDTLMISRTPEVTCVVVDVSHED |
| | N362C | PEVKFNWYVDGVEVHNAKTKPREEQYGSTYRVVSVLTVLHQDWLNGKEYK |
| | | CKVSNKALPAPIEKTISKAKGQPREPQVYTLPPSREEMTKCQVSLTCLVK |
| | | GFYPSDIAVEWESNGQPENNYKTTPPVLDSDGSFFLYSKLTVDKSRWQQG |
| | | NVFSCSVMHEALHNHYTQKSLSLSPGK |
| 1737 | hu Fc SEFL | DKTHTCPPCPAPELLGGPSVFLFPPKPKDTLMISRTPEVTCVVVDVSHED |
| | Q363C | PEVKFNWYVDGVEVHNAKTKPREEQYGSTYRVVSVLTVLHQDWLNGKEYK |
| | | CKVSNKALPAPIEKTISKAKGQPREPQVYTLPPSREEMTKNCVSLTCLVK |
| | | GFYPSDIAVEWESNGQPENNYKTTPPVLDSDGSFFLYSKLTVDKSRWQQG |
| | | NVFSCSVMHEALHNHYTQKSLSLSPGK |
| 1738 | hu Fc SEFL | DKTHTCPPCPAPELLGGPSVFLFPPKPKDTLMISRTPEVTCVVVDVSHED |
| | N391C | PEVKFNWYVDGVEVHNAKTKPREEQYGSTYRVVSVLTVLHQDWLNGKEYK |
| | | CKVSNKALPAPIEKTISKAKGQPREPQVYTLPPSREEMTKNQVSLTCLVK |
| | | GFYPSDIAVEWESNGQPENCYKTTPPVLDSDGSFFLYSKLTVDKSRWQQG |
| | | NVFSCSVMHEALHNHYTQKSLSLSPGK |
| 1739 | hu Fc SEFL | DKTHTCPPCPAPELLGGPSVFLFPPKPKDTLMISRTPEVTCVVVDVSHED |
| | L399C | PEVKFNWYVDGVEVHNAKTKPREEQYGSTYRVVSVLTVLHQDWLNGKEYK |
| | | CKVSNKALPAPIEKTISKAKGQPREPQVYTLPPSREEMTKNQVSLTCLVK |
| | | GFYPSDIAVEWESNGQPENNYKTTPPVCDSDGSFFLYSKLTVDKSRWQQG |
| | | NVFSCSVMHEALHNHYTQKSLSLSPGK |
| 1740 | hu Fc SEFL | DKTHTCPPCPAPELLGGPSVFLFPPKPKDTLMISRTPEVTCVVVDVSHED |
| | D414C | PEVKFNWYVDGVEVHNAKTKPREEQYGSTYRVVSVLTVLHQDWLNGKEYK |
| | | CKVSNKALPAPIEKTISKAKGQPREPQVYTLPPSREEMTKNQVSLTCLVK |
| | | GFYPSDIAVEWESNGQPENNYKTTPPVLDSDGSFFLYSKLTVCKSRWQQG |
| | | NVFSCSVMHEALHNHYTQKSLSLSPGK |
| 1741 | T360C, non- | DKTHTCPPCPAPELLGGPSVFLFPPKPKDTLMISRTPEVTCVVVDVSHED |
| | SEFL Fc | PEVKFNWYVDGVEVHNAKTKPREEQYNSTYRVVSVLTVLHQDWLNGKEYK |
| | sequence | CKVSNKALPAPIEKTISKAKGQPREPQVYTLPPSREEMCKNQVSLTCLVK |
| | | GFYPSDIAVEWESNGQPENNYKTTPPVLDSDGSFFLYSKLTVDKSRWQQG |
| | | NVFSCSVMHEALHNHYTQKSLSLSPGK |
| 1742 | D70C, non- | QVQLQESGPGLVKPSQTLSLTCTVSGGSISSGDYFWSWIRQLPGKGLEWI |
| | SEFL Heavy | GHIHNSGTTYYNPSLKSRVTISVDTSKKQFSLRLSSVTAADTAVYYCARD |
| | Chain | RGGDYAYGMDVWGQGTTVTVSSASTKGPSVFPLAPSSKSTSGGTAALGCL |
| | sequence | VKDYFPEPVTVSWNSGALTSGVHTFPAVLQSSGLYSLSSVVTVPSSSLGT |
| | | QTYICNVNHKPSNTKVDKRVEPKSCDKTHTCPPCPAPELLGGPSVFLFPP |
| | | KPKDTLMISRTPEVTCVVVDVSHEDPEVKFNWYVDGVEVHNAKTKPREEQ |
| | | YNSTYRVVSVLTVLHQDWLNGKEYKCKVSNKALPAPIEKTISKAKGQPRE |
| | | PQVYTLPPSREEMTKNQVSLTCLVKGFYPSDIAVEWESNGQPENNYKTTP |
| | | PVLDSDGSFFLYSKLTVDKSRWQQGNVFSCSVMHEALHNHYTQKSLSLSP |
| | | GK |
| 1743 | A89C, non- | QVQLQESGPGLVKPSQTLSLTCTVSGGSISSGDYFWSWIRQLPGKGLEWI |
| | SEFL Heavy | GHIHNSGTTYYNPSLKSRVTISVDTSKKQFSLRLSSVTACDTAVYYCARD |
| | Chain | RGGDYAYGMDVWGQGTTVTVSSAVSWNSGALTSGVHTFPAVLQSSGLYSL |
| | Sequence | SSVVTVPSSSLGTQTYICNVNHKPSNTKVDKRVEPKSCDKTHTCPPCPAP |
| | | ELLSTKGPSVFPLAPSSKSTSGGTAALGCLVKDYFPEPVTGGPSVFLFPP |
| | | KPKDTLMISRTPEVTCVVVDVSHEDPEVKFNWYVDGVEVHNAKTKPREEQ |
| | | YNSTYRVVSVLTVLHQDWLNGKEYKCKVSNKALPAPIEKTISKAKGQPRE |
| | | PQVYTLPPSREEMTKNQVSLTCLVKGFYPSDIAVEWESNGQPENNYKTTP |
| | | PVLDSDGSFFLYSKLTVDKSRWQQGNVFSCSVMHEALHNHYTQKSLSLSP |
| | | GK |
| 1744 | A89C, non- | EIVLTQSPGTLSLSPGERATLSCRASQGISRSELAWYQQKPGQAPSLLIY |
| | SEFL Light | GASSRATGIPDRFSGSGSGTDFTLTISRLEPEDFAVYYCQQFGSSPWTFG |
| | Chain | QGTKVEIKRTVAAPSVFIFPPSDEQLKSQESVTEQDSKDSTYSLSSTLTL |
| | sequence | SKADYEKHKVYACEVTHQGLSSPVTKSFNRGECGTASVVCLLNNFYPREA |
| | | KVQWKVDNALQSGNS |

[0566] Variable regions of immunoglobulin chains generally exhibit the same overall structure, comprising relatively conserved framework regions (FR) joined by three hypervariable regions, more often called “complementarity determining regions” or CDRs. The CDRs from the two chains of each heavy chain/light chain pair mentioned above typically are aligned by the framework regions to form a structure that binds specifically with a specific epitope or domain on the target protein, if any. From N-terminal to C-terminal, naturally-occurring light and heavy chain variable regions both typically conform with the following order of these elements: FR1, CDR1, FR2, CDR2, FR3, CDR3 and FR4. A numbering system has been devised for assigning numbers to amino acids that occupy positions in each of these domains. This numbering system is defined in Kabat Sequences of Proteins of Immunological Interest (1987 and 1991, NIH, Bethesda, Md.), or Chothia & Lesk, 1987, J. Mol. Biol. 196:901-917; Chothia et al., 1989, Nature 342:878-883.

[0567] An “antibody”, or interchangeably “Ab”, is a tetrameric immunoglobulin protein. In a naturally-occurring antibody, which is typically a glycoprotein, each tetramer is composed of two identical pairs of polypeptide chains, each pair having one “light” chain of about 220 amino acids (about 25 kDa) and one “heavy” chain of about 440 amino acids (about 50-70 kDa). The amino-terminal portion of each chain includes a “variable” (“V”) region of about 100 to 110 or more amino acids primarily responsible for antigen recognition. The carboxy-terminal portion of each chain defines a constant region primarily responsible for effector function. The variable region differs among different antibodies. The constant region is the same among different antibodies. Within the variable region of each heavy or light chain, there are three hypervariable subregions that help determine the antibody's specificity for antigen. The variable domain residues between the hypervariable regions are called the framework residues and generally are somewhat homologous among different antibodies. Immunoglobulins can be assigned to different classes depending on the amino acid sequence of the constant domain of their heavy chains. Human light chains are classified as kappa (κ) and lambda (λ) light chains. Within light and heavy chains, the variable and constant regions are joined by a “J” region of about 12 or more amino acids, with the heavy chain also including a “D” region of about 10 more amino acids. See generally, Fundamental Immunology, Ch. 7 (Paul, W., ed., 2nd ed. Raven Press, N.Y. (1989)). Within the scope of the invention, an “antibody” also encompasses a recombinantly made antibody, and antibodies that are lacking glycosylation. (See, e.g., Jung et al., Bypassing glycosylation: engineering aglycosylated full-length IgG antibodies for human therapy, Current Opinion in Biotechnology 22:858-867 (2011); Lazar et al., Optimized Fc Variants and Methods for Their Generation, WO2004/099249 A2)

[0568] The term “light chain” or “immunoglobulin light chain” includes a full-length light chain and fragments thereof having sufficient variable region sequence to confer binding specificity. A full-length light chain includes a variable region domain, VL, and a constant region domain, CL. The variable region domain of the light chain is at the amino-terminus of the polypeptide. Light chains include kappa chains and lambda chains. The term “heavy chain” or “immunoglobulin heavy chain” includes a full-length heavy chain and fragments thereof having sufficient variable region sequence to confer binding specificity. A full-length heavy chain includes a variable region domain, V_{H}, and three constant region domains, C_{H}1, C_{H}2, and C_{H}3. The V_{H} domain is at the amino-terminus of the polypeptide, and the C_{H} domains are at the carboxyl-terminus, with the C_{H}3 being closest to the carboxy-terminus of the polypeptide. Heavy chains are classified as mu (μ), delta (Δ), gamma (γ), alpha (α), and epsilon (ε), and define the antibody's isotype as IgM, IgD, IgG, IgA, and IgE, respectively. In separate embodiments of the invention, heavy chains may be of any isotype, including IgG (including IgG1, IgG2, IgG3 and IgG4 subtypes), IgA (including IgA1 and IgA2 subtypes), IgM and IgE. Several of these may be further divided into subclasses or isotypes, e.g. IgG1, IgG2, IgG3, IgG4, IgA1 and IgA2. The variable regions of each light/heavy chain pair typically form the antigen binding site of an antibody, but a useful carrier antibody need not have a known antigen binding site to be useful. (See, e.g., Doellgast et al., WO 2010/108153 A2; Walker et al., PCT/US2011/052841). Different IgG isotypes may have different effector functions (mediated by the Fc region), such as antibody-dependent cellular cytotoxicity (ADCC) and complement-dependent cytotoxicity (CDC). In ADCC, the Fc region of an antibody binds to Fc receptors (FcγRs) on the surface of immune effector cells such as natural killers and macrophages, leading to the phagocytosis or lysis of the targeted cells. In CDC, the antibodies kill the targeted cells by triggering the complement cascade at the cell surface.

[0569] An “Fe region”, or used interchangeably herein, “Fe domain” or “immunoglobulin Fc domain”, contains two heavy chain fragments, which in a full antibody comprise the C_{H}1 and C_{H}2 domains of the antibody. The two heavy chain fragments are held together by two or more disulfide bonds and by hydrophobic interactions of the C_{H}3 domains.

[0570] The term “salvage receptor binding epitope” refers to an epitope of the Fc region of an IgG molecule (e.g., IgG₁, IgG₂, IgG₃, or IgG₄) that is responsible for increasing the in vivo serum half-life of the IgG molecule.

[0571] “Allotypes” are variations in antibody sequence, often in the constant region, that can be immunogenic and are encoded by specific alleles in humans. Allotypes have been identified for five of the human IGHC genes, the IGHG1, IGHG2, IGHG3, IGHA2 and IGHE genes, and are designated as G1m, G2m, G3m, A2m, and Em allotypes, respectively. At least 18 Gm allotypes are known: nG1m(1), nG1m(2), G1m (1, 2, 3, 17) or G1m (a, x, f, z), G2m (23) or G2m (n), G3m (5, 6, 10, 11, 13, 14, 15, 16, 21, 24, 26, 27, 28) or G3m (b1, c3, b5, b0, b3, b4, s, t, g1, c5, u, v, g5). There are two A2m allotypes A2m(1) and A2m(2).

[0572] For a detailed description of the structure and generation of antibodies, see Roth, D. B., and Craig, N. L., Cell, 94:411-414 (1998), herein incorporated by reference in its entirety. Briefly, the process for generating DNA encoding the heavy and light chain immunoglobulin sequences occurs primarily in developing B-cells. Prior to the rearranging and joining of various immunoglobulin gene segments, the V, D, J and constant (C) gene segments are found generally in relatively close proximity on a single chromosome. During B-cell-differentiation, one of each of the appropriate family members of the V, D, J (or only V and J in the case of light chain genes) gene segments are recombined to form functionally rearranged variable regions of the heavy and light immunoglobulin genes. This gene segment rearrangement process appears to be sequential. First, heavy chain D-to-J joints are made, followed by heavy chain V-to-DJ joints and light chain V-to-J joints. In addition to the rearrangement of V, D and J segments, further diversity is generated in the primary repertoire of immunoglobulin heavy and light chains by way of variable recombination at the locations where the V and J segments in the light chain are joined and where the D and J segments of the heavy chain are joined. Such variation in the light chain typically occurs within the last codon of the V gene segment and the first codon of the J segment. Similar imprecision in joining occurs on the heavy chain chromosome between the D and J_{H} segments and may extend over as many as 10 nucleotides. Furthermore, several nucleotides may be inserted between the D and J_{H} and between the V_{H} and D gene segments which are not encoded by genomic DNA. The addition of these nucleotides is known as N-region diversity. The net effect of such rearrangements in the variable region gene segments and the variable recombination which may occur during such joining is the production of a primary antibody repertoire.

[0573] The term “hypervariable” region refers to the amino acid residues of an antibody which are responsible for antigen-binding. The hypervariable region comprises amino acid residues from a complementarity determining region or CDR [i.e., residues 24-34 (L1), 50-56 (L2) and 89-97 (L3) in the light chain variable domain and 31-35 (H1), 50-65 (H2) and 95-102 (H3) in the heavy chain variable domain as described by Kabat et al., Sequences of Proteins of Immunological Interest, 5^{th} Ed. Public Health Service, National Institutes of Health, Bethesda, Md. (1991)]. Even a single CDR may recognize and bind antigen, although with a lower affinity than the entire antigen binding site containing all of the CDRs.

[0574] An alternative definition of residues from a hypervariable “loop” is described by Chothia et al., J. Mol. Biol. 196: 901-917 (1987) as residues 26-32 (L1), 50-52 (L2) and 91-96 (L3) in the light chain variable domain and 26-32 (H1), 53-55 (H2) and 96-101 (H3) in the heavy chain variable domain.

[0575] “Framework” or “FR” residues are those variable region residues other than the hypervariable region residues.

[0576] “Antibody fragments” comprise a portion of an intact full length antibody, preferably the antigen binding or variable region of the intact antibody. Examples of antibody fragments include Fab, Fab′, F(ab′)₂, and Fv fragments; diabodies; linear antibodies (Zapata et al., Protein Eng., 8(10):1057-1062 (1995)); single-chain antibody molecules; and multispecific antibodies formed from antibody fragments.

[0577] Papain digestion of antibodies produces two identical antigen-binding fragments, called “Fab” fragments, each with a single antigen-binding site, and a residual “Fc” fragment which contains the constant region. The Fab fragment contains all of the variable domain, as well as the constant domain of the light chain and the first constant domain (CH1) of the heavy chain. The Fc fragment displays carbohydrates and is responsible for many antibody effector functions (such as binding complement and cell receptors), that distinguish one class of antibody from another.

[0578] Pepsin treatment yields an F(ab′)₂ fragment that has two “Single-chain Fv” or “scFv” antibody fragments comprising the VH and VL domains of antibody, wherein these domains are present in a single polypeptide chain. Fab fragments differ from Fab′ fragments by the inclusion of a few additional residues at the carboxy terminus of the heavy chain CH1 domain including one or more cysteines from the antibody hinge region. Preferably, the Fv polypeptide further comprises a polypeptide linker between the VH and VL domains that enables the Fv to form the desired structure for antigen binding. For a review of scFv see Pluckthun in The Pharmacology of Monoclonal Antibodies, vol. 113, Rosenburg and Moore eds., Springer-Verlag, New York, pp. 269-315 (1994).

[0579] A “Fab fragment” is comprised of one light chain and the C_{H}1 and variable regions of one heavy chain. The heavy chain of a Fab molecule cannot form a disulfide bond with another heavy chain molecule.

[0580] A “Fab′ fragment” contains one light chain and a portion of one heavy chain that contains the V_{H} domain and the C_{H}1 domain and also the region between the C_{H}1 and C_{H}2 domains, such that an interchain disulfide bond can be formed between the two heavy chains of two Fab′ fragments to form an F(ab′)₂ molecule.

[0581] A “F(ab′)₂ fragment” contains two light chains and two heavy chains containing a portion of the constant region between the C_{H}1 and C_{H}2 domains, such that an interchain disulfide bond is formed between the two heavy chains. A F(ab′)_{z} fragment thus is composed of two Fab′ fragments that are held together by a disulfide bond between the two heavy chains.

[0582] “Fv” is the minimum antibody fragment that contains a complete antigen recognition and binding site. This region consists of a dimer of one heavy- and one light-chain variable domain in tight, non-covalent association. It is in this configuration that the three CDRs of each variable domain interact to define an antigen binding site on the surface of the VH VL dimer. A single variable domain (or half of an Fv comprising only three CDRs specific for an antigen) has the ability to recognize and bind antigen, although at a lower affinity than the entire binding site.

[0583] “Single-chain antibodies” are Fv molecules in which the heavy and light chain variable regions have been connected by a flexible linker to form a single polypeptide chain, which forms an antigen-binding region. Single chain antibodies are discussed in detail in International Patent Application Publication No. WO 88/01649 and U.S. Pat. No. 4,946,778 and U.S. Pat. No. 5,260,203, the disclosures of which are incorporated by reference in their entireties.

[0584] “Single-chain Fv” or “scFv” antibody fragments comprise the V_{H} and V_{L} domains of antibody, wherein these domains are present in a single polypeptide chain, and optionally comprising a polypeptide linker between the V_{H} and V_{L} domains that enables the Fv to form the desired structure for antigen binding (Bird et al., Science 242:423-426, 1988, and Huston et al., Proc. Natl. Acad. Sci. USA 85:5879-5883, 1988). An “Fd” fragment consists of the V_{H} and C_{H}1 domains.

[0585] The term “diabodies” refers to small antibody fragments with two antigen-binding sites, which fragments comprise a heavy-chain variable domain (VH) connected to a light-chain variable domain (VL) in the same polypeptide chain (VH VL). By using a linker that is too short to allow pairing between the two domains on the same chain, the domains are forced to pair with the complementary domains of another chain and create two antigen-binding sites. Diabodies are described more fully in, for example, EP 404,097; WO 93/11161; and Hollinger et al., Proc. Natl. Acad. Sci. USA, 90:6444-6448 (1993).

[0586] A “domain antibody” is an immunologically functional immunoglobulin fragment containing only the variable region of a heavy chain or the variable region of a light chain. In some instances, two or more V_{H} regions are covalently joined with a peptide linker to create a bivalent domain antibody. The two V_{H} regions of a bivalent domain antibody may target the same or different antigens.

[0587] The term “epitope” is the portion of a molecule that is bound by an antigen binding protein (for example, an antibody). The term includes any determinant capable of specifically binding to an antigen binding protein, such as an antibody or to a T-cell receptor. An epitope can be contiguous or non-contiguous (e.g., in a single-chain polypeptide, amino acid residues that are not contiguous to one another in the polypeptide sequence but that within the context of the molecule are bound by the antigen binding protein). In certain embodiments, epitopes may be mimetic in that they comprise a three dimensional structure that is similar to an epitope used to generate the antigen binding protein, yet comprise none or only some of the amino acid residues found in that epitope used to generate the antigen binding protein. Most often, epitopes reside on proteins, but in some instances may reside on other kinds of molecules, such as nucleic acids. Epitope determinants may include chemically active surface groupings of molecules such as amino acids, sugar side chains, phosphoryl or sulfonyl groups, and may have specific three dimensional structural characteristics, and/or specific charge characteristics. Generally, antibodies specific for a particular target antigen will preferentially recognize an epitope on the target antigen in a complex mixture of proteins and/or macromolecules.

[0588] The term “identity” refers to a relationship between the sequences of two or more polypeptide molecules or two or more nucleic acid molecules, as determined by aligning and comparing the sequences. “Percent identity” means the percent of identical residues between the amino acids or nucleotides in the compared molecules and is calculated based on the size of the smallest of the molecules being compared. For these calculations, gaps in alignments (if any) must be addressed by a particular mathematical model or computer program (i.e., an “algorithm”). Methods that can be used to calculate the identity of the aligned nucleic acids or polypeptides include those described in Computational Molecular Biology, (Lesk, A. M., ed.), 1988, New York: Oxford University Press; Biocomputing Informatics and Genome Projects, (Smith, D. W., ed.), 1993, New York: Academic Press; Computer Analysis of Sequence Data, Part I, (Griffin, A. M., and Griffin, H. G., eds.), 1994, New Jersey: Humana Press; von Heinje, G., 1987, Sequence Analysis in Molecular Biology, New York: Academic Press; Sequence Analysis Primer, (Gribskov, M. and Devereux, J., eds.), 1991, New York: M. Stockton Press; and Carillo et al., 1988, SIAM J. Applied Math. 48:1073. For example, sequence identity can be determined by standard methods that are commonly used to compare the similarity in position of the amino acids of two polypeptides. Using a computer program such as BLAST or FASTA, two polypeptide or two polynucleotide sequences are aligned for optimal matching of their respective residues (either along the full length of one or both sequences, or along a pre-determined portion of one or both sequences). The programs provide a default opening penalty and a default gap penalty, and a scoring matrix such as PAM 250 [a standard scoring matrix; see Dayhoff et al., in Atlas of Protein Sequence and Structure, vol. 5, supp. 3 (1978)] can be used in conjunction with the computer program. For example, the percent identity can then be calculated as: the total number of identical matches multiplied by 100 and then divided by the sum of the length of the longer sequence within the matched span and the number of gaps introduced into the longer sequences in order to align the two sequences. In calculating percent identity, the sequences being compared are aligned in a way that gives the largest match between the sequences.

[0589] The GCG program package is a computer program that can be used to determine percent identity, which package includes GAP (Devereux et al., 1984, Nucl. Acid Res. 12:387; Genetics Computer Group, University of Wisconsin, Madison, Wis.). The computer algorithm GAP is used to align the two polypeptides or two polynucleotides for which the percent sequence identity is to be determined. The sequences are aligned for optimal matching of their respective amino acid or nucleotide (the “matched span”, as determined by the algorithm). A gap opening penalty (which is calculated as 3× the average diagonal, wherein the “average diagonal” is the average of the diagonal of the comparison matrix being used; the “diagonal” is the score or number assigned to each perfect amino acid match by the particular comparison matrix) and a gap extension penalty (which is usually 1/10 times the gap opening penalty), as well as a comparison matrix such as PAM 250 or BLOSUM 62 are used in conjunction with the algorithm. In certain embodiments, a standard comparison matrix (see, Dayhoff et al., 1978, Atlas of Protein Sequence and Structure 5:345-352 for the PAM 250 comparison matrix; Henikoff et al., 1992, Proc. Natl. Acad. Sci. U.S.A. 89:10915-10919 for the BLOSUM 62 comparison matrix) is also used by the algorithm.

[0590] Recommended parameters for determining percent identity for polypeptides or nucleotide sequences using the GAP program include the following:

Algorithm: Needleman et al., 1970, J. Mol. Biol. 48:443-453;
Comparison matrix: BLOSUM 62 from Henikoff et al., 1992, supra;
Gap Penalty: 12 (but with no penalty for end gaps)

### Gap Length Penalty: 4

### Threshold of Similarity: 0

[0591] Certain alignment schemes for aligning two amino acid sequences may result in matching of only a short region of the two sequences, and this small aligned region may have very high sequence identity even though there is no significant relationship between the two full-length sequences. Accordingly, the selected alignment method (GAP program) can be adjusted if so desired to result in an alignment that spans at least 50 contiguous amino acids of the target polypeptide.

[0592] The term “modification” when used in connection with immmunoglobulins, including antibodies and antibody fragments, of the invention, include, but are not limited to, one or more amino acid changes (including substitutions, insertions or deletions); chemical modifications; covalent modification by conjugation to therapeutic or diagnostic agents; labeling (e.g., with radionuclides or various enzymes); covalent polymer attachment such as PEGylation (derivatization with polyethylene glycol) and insertion or substitution by chemical synthesis of non-natural amino acids.

[0593] The term “derivative” when used in connection with an immunoglobulin (including antibodies and antibody fragments) within the scope of the invention refers to immunoglobulin proteins that are covalently modified by conjugation to therapeutic or diagnostic agents, labeling (e.g., with radionuclides or various enzymes), covalent polymer attachment such as PEGylation (derivatization with polyethylene glycol) and insertion or substitution by chemical synthesis of non-natural amino acids. Derivatives of the invention will retain the binding properties of underivatized molecules of the invention.

[0594] In some embodiments of the invention, the half-life extending moiety is an immunoglobulin Fc domain (e.g., a human immunoglobulin Fc domain, including Fc of allotype IgG1, IgG2, IgG3 or IgG4) or a portion thereof (e.g., CH2 domain of the Fc domain), human serum albumin (HSA), or poly(ethylene glycol) (PEG), in particular PEG of molecular weight of about 1000 Da to about 100000 Da.

[0595] Monovalent dimeric or bivalent dimeric Fc-toxin peptide analog fusions or conjugates are useful embodiments of the inventive composition of matter. A “monovalent dimeric” Fc-toxin peptide analog fusion or conjugate, or interchangeably, “monovalent dimer”, or interchangeably, “monovalent heterodimer”, is a Fc-toxin peptide analog fusion or conjugate that includes a toxin peptide analog conjugated with only one of the dimerized Fc domains (e.g., as represented schematically in FIG. 2B of Sullivan et al., Toxin Peptide Therapeutic Agents, US2007/0071764 and Sullivan et al., Toxin Peptide Therapeutic Agents, PCT/US2007/022831, published as WO 2008/088422, which are both incorporated herein by reference in their entireties). A “bivalent dimeric” Fc-toxin peptide analog fusion, or interchangeably, “bivalent dimer” or “bivalent homodimer”, is a Fc-toxin peptide analog fusion or conjugate having both of the dimerized Fc domains each conjugated separately with a toxin peptide analog (e.g., as represented schematically in FIG. 2C of Sullivan et al., Toxin Peptide Therapeutic Agents, US2007/0071764 and Sullivan et al., Toxin Peptide Therapeutic Agents, PCT/US2007/022831, published as WO 2008/088422).

[0596] Immunoglobulin Fc domains include Fc variants, which are suitable half-life extending moieties within the scope of this invention. A native Fc can be extensively modified to form an Fc variant in accordance with this invention, provided binding to the salvage receptor is maintained; see, for example WO 97/34631, WO 96/32478, and WO 04/110 472. In such Fc variants, one can remove one or more sites of a native Fc that provide structural features or functional activity not required by the fusion or conjugate molecules of this invention. One can remove these sites by, for example, substituting or deleting residues, inserting residues into the site, or truncating portions containing the site. The inserted or substituted residues can also be altered amino acids, such as peptidomimetics or D-amino acids. Fc variants can be desirable for a number of reasons, several of which are described below. Exemplary Fc variants include molecules and sequences in which:

[0597] 1. Sites involved in disulfide bond formation are removed. Such removal can avoid reaction with other cysteine-containing proteins present in the host cell used to produce the molecules of the invention. For this purpose, the cysteine-containing segment at the N-terminus can be truncated or cysteine residues can be deleted or substituted with other amino acids (e.g., alanyl, seryl). In particular, one can truncate the N-terminal 20-amino acid segment of SEQ ID NO: 478:

SEQ ID NO: 478
Met Glu Trp Ser Trp Val Phe Leu Phe Phe Leu Ser
Val Thr Thr Gly Val His Ser Asp Lys Thr His Thr
Cys Pro Pro Cys Pro Ala Pro Glu Leu Leu Gly Gly
Pro Ser Val Phe Leu Phe Pro Pro Lys Pro Lys Asp
Thr Leu Met Ile Ser Arg Thr Pro Glu Val Thr Cys
Val Val Val Asp Val Ser His Glu Asp Pro Glu Val
Lys Phe Asn Trp Tyr Val Asp Gly Val Glu Val His
Asn Ala Lys Thr Lys Pro Arg Glu Glu Gln Tyr Asn
Ser Thr Tyr Arg Val Val Ser Val Leu Thr Val Leu
His Gln Asp Trp Leu Asn Gly Lys Glu Tyr Lys Cys
Lys Val Ser Asn Lys Ala Leu Pro Ala Pro Ile Glu
Lys Thr Ile Ser Lys Ala Lys Gly Gln Pro Arg Glu
Pro Gln Val Tyr Thr Leu Pro Pro Ser Arg Asp Glu
Leu Thr Lys Asn Gln Val Ser Leu Thr Cys Leu Val
Lys Gly Phe Tyr Pro Ser Asp Ile Ala Val Glu Trp
Glu Ser Asn Gly Gln Pro Glu Asn Asn Tyr Lys Thr
Thr Pro Pro Val Leu Asp Ser Asp Gly Ser Phe Phe
Leu Tyr Ser Lys Leu Thr Val Asp Lys Ser Arg Trp
Gln Gln Gly Asn Val Phe Ser Cys Ser Val Met His
Glu Ala Leu His Asn His Tyr Thr Gln Lys Ser Leu
Ser Leu Ser Pro Gly Lys//.

or delete or substitute the cysteine residues at positions 7 and 10 of SEQ ID NO: 478. Even when cysteine residues are removed, the single chain Fc domains can still form a dimeric Fc domain that is held together non-covalently.

[0598] 2. A native Fc is modified to make it more compatible with a selected host cell. For example, one can remove the PA dipeptide sequence near the N-terminus of a typical native Fc, which can be recognized by a digestive enzyme in E. coli such as proline iminopeptidase. One can also add an N-terminal methionine residue, especially when the molecule is expressed recombinantly in a bacterial cell such as E. coli. The Fc domain of SEQ ID NO: 478 is one such Fc variant.

[0599] 3. A portion of the N-terminus of a native Fc is removed to prevent N-terminal heterogeneity when expressed in a selected host cell. For this purpose, one can delete any of the first 20 amino acid residues at the N-terminus, particularly those at positions 1, 2, 3, 4 and 5.

[0600] 4. One or more glycosylation sites are removed. Residues that are typically glycosylated (e.g., asparagine) can confer cytolytic response. Such residues can be deleted or substituted with unglycosylated residues (e.g., alanine).

[0601] 5. Sites involved in interaction with complement, such as the C1q binding site, are removed. For example, one can delete or substitute the EKK tripeptide sequence of human IgG1. Complement recruitment may not be advantageous for the molecules of this invention and so can be avoided with such an Fc variant.

[0602] 6. Sites are removed that affect binding to Fc receptors other than a salvage receptor. A native Fc can have sites for interaction with certain white blood cells that are not required for the fusion or conjugate molecules of the present invention and so can be removed.

[0603] 7. The ADCC site is removed to decrease or eliminate ADCC effector function, or alternatively, modified for enhanced ADCC effector function by non-fucosylation or de-fucosylation. ADCC sites are known in the art; see, for example, Molec. Immunol. 29 (5): 633-9 (1992) with regard to ADCC sites in IgG1. These sites, as well, are not required for the fusion or conjugate molecules of the present invention and so can be removed, or enhanced for ADCC effector function, as may be desired. (See, Iida et al., Two mechanisms of the enhanced antibody-dependent cellular cytotoxicity (ADCC) efficacy of non-fucosylated therapeutic antibodies in human blood, BMC Cancer 9:58 doi:10.1186/1471-2407-9-58 (2009)).

[0604] 8. When the native Fc is derived from a non-human antibody, the native Fc can be humanized. Typically, to humanize a native Fc, one will substitute selected residues in the non-human native Fc with residues that are normally found in human native Fc. Techniques for antibody humanization are well known in the art.

[0605] 9. One or more toxin peptide analog sequences can be inserted into an internal conjugation site, or sites, within a loop region of an immunoglobulin Fc domain, as disclosed in U.S. Pat. Nos. 7,442,778; 7,645,861; 7,655,764; 7,655,765; 7,662,931; 7,750,127, and 7,750,128. The term “loop” region or “Fc-loop” region refers to a primary sequence of amino acid residues which connects two regions comprising secondary structure, such as an α-helix or a β-sheet, in the immediate N-terminal and C-terminal directions of primary structure from the loop region. Examples include, but are not limited to, CH2 or CH3 loop regions. One of skill in the art understands that a loop region, while not itself comprising secondary structure, may influence or contribute to secondary or higher order protein structure. The term “internal” conjugation site means that the toxin peptide analog moiety, or moieties, is non-terminal, i.e., not through the α-amino site or the α-carboxy site of the Fc domain, although there optionally can also be additional moieties conjugated terminally at the N-terminal and/or C-terminal of the Fc domain.

[0606] 10. A linker of suitable length and neutral charge, such as “L25” (GGGGSGGGGSGGGGSGGGGSGGGGS; SEQ ID NO:493) or “L20” (GGGGSGGGGSGGGGSGGGGS; SEQ ID NO:477), can be covalently fused between the C-terminal of one monomer of an Fc domain and the N-terminal of a second Fc domain monomer, with a toxin peptide analog fused to the N-terminal of the first Fc domain monomer or the C-terminal of the second Fc domain monomer, or within a loop region of the first and/or second Fc domain monomer. Such a molecule can be recombinantly expressed in bacterial or mammalian cells to produce a variant “monovalent dimeric” Fc-toxin peptide analog fusion or conjugate with the typical disulfide bond formation between the Fc monomers. (See, e.g., Example 13 herein). Other examples of Fc variants include the following: In SEQ ID NO: 478, the leucine at position 15 can be substituted with glutamate; the glutamate at position 99, with alanine; and the lysines at positions 101 and 103, with alanines. In addition, phenyalanine residues can replace one or more tyrosine residues. For purposes of the invention, a variant Fc domain can also be part of a monomeric immunoglobulin heavy chain, an antibody, or a heterotrimeric hemibody (LC+HC+Fc).

[0607] An alternative half-life extending moiety would be a protein, polypeptide, peptide, antibody, antibody fragment, or small molecule (e.g., a peptidomimetic compound) capable of binding to a salvage receptor. For example, one could use as a half-life extending moiety a polypeptide as described in U.S. Pat. No. 5,739,277, issued Apr. 14, 1998 to Presta et al. Peptides could also be selected by phage display for binding to the FcRn salvage receptor. Such salvage receptor-binding compounds are also included within the meaning of “half-life extending moiety” and are within the scope of this invention. Such half-life extending moieties should be selected for increased half-life (e.g., by avoiding sequences recognized by proteases) and decreased immunogenicity (e.g., by favoring non-immunogenic sequences, as discovered in antibody humanization).

[0608] As noted above, polymer half-life extending moieties can also be used. Various means for attaching chemical moieties useful as half-life extending moieties are currently available, see, e.g., Patent Cooperation Treaty (“PCT”) International Publication No. WO 96/11953, entitled “N-Terminally Chemically Modified Protein Compositions and Methods,” herein incorporated by reference in its entirety. This PCT publication discloses, among other things, the selective attachment of water-soluble polymers to the N-terminus of proteins.

[0609] In some embodiments of the inventive compositions, the polymer half-life extending moiety is polyethylene glycol (PEG), covalently linked at the N-terminal, C-terminal or at one or more intercalary side chains of toxin peptide analog. Some embodiments of the inventive composition of matter further include one or more PEG moieties conjugated to a non-PEG half-life extending moiety or to the toxin peptide analog, or to any combination of any of these. For example, an Fc domain or portion thereof in the inventive composition can be made mono-PEGylated, di-PEGylated, or otherwise multi-PEGylated, by the process of reductive alkylation.

[0610] Covalent conjugation of proteins and peptides with poly(ethylene glycol) (PEG) has been widely recognized as an approach to significantly extend the in vivo circulating half-lives of therapeutic proteins. PEGylation achieves this effect predominately by retarding renal clearance, since the PEG moiety adds considerable hydrodynamic radius to the protein. (Zalipsky, S., et al., Use of functionalized poly(ethylene glycol)s for modification of polypeptides., in poly(ethylene glycol) chemistry: Biotechnical and biomedical applications., J. M. Harris, Ed., Plenum Press: New York., 347-370 (1992)). Additional benefits often conferred by PEGylation of proteins and peptides include increased solubility, resistance to proteolytic degradation, and reduced immunogenicity of the therapeutic polypeptide. The merits of protein PEGylation are evidenced by the commercialization of several PEGylated proteins including PEG-Adenosine deaminase (Adagen™/Enzon Corp.), PEG-L-asparaginase (Oncaspar™/Enzon Corp.), PEG-Interferon α-2b (PEG-Intron™/Schering/Enzon), PEG-Interferon α-2a (PEGASYS™/Roche) and PEG-G-CSF (Neulasta™/Amgen) as well as many others in clinical trials.

[0611] By “PEGylated peptide” or “PEGylated protein” is meant a peptide having a polyethylene glycol (PEG) moiety covalently bound to an amino acid residue of the peptide itself or to a peptidyl or non-peptidyl linker that is covalently bound to a residue of the peptide, either directly or indirectly through another linker moiety. A non-limiting example is N-terminal conjugation of the peptide with 3-(1-(1-bromo-2-oxo-6,9,12,15,18,21,24,27,30,33,36-undecaoxa-3-azaoctatriacontan-38-yl)-1H-1,2,3-triazol-4-yl)propanoyl (designated herein by the abbreviation “{bromoacetamide-PEG11-triazole}-”).

[0612] By “polyethylene glycol” or “PEG” is meant a polyalkylene glycol compound or a derivative thereof, with or without coupling agents or derivatization with coupling or activating moieties (e.g., with aldehyde, hydroxysuccinimidyl, hydrazide, thiol, triflate, tresylate, azirdine, oxirane, orthopyridyl disulphide, vinylsulfone, iodoacetamide or a maleimide moiety). In accordance with the present invention, useful PEG includes substantially linear, straight chain PEG, branched PEG (brPEG), or dendritic PEG. (See, e.g., Merrill, U.S. Pat. No. 5,171,264; Harris et al., Multiarmed, monofunctional, polymer for coupling to molecules and surfaces, U.S. Pat. No. 5,932,462; Shen, N-maleimidyl polymer derivatives, U.S. Pat. No. 6,602,498).

[0613] Briefly, the PEG groups are generally attached to the peptide portion of the composition of the invention via acylation or reductive alkylation (or reductive amination) through a reactive group on the PEG moiety (e.g., an aldehyde, amino, thiol, or ester group) to a reactive group on the inventive compound (e.g., an aldehyde, amino, or ester group). A useful strategy for the PEGylation of synthetic peptides consists of combining, through forming a conjugate linkage in solution, a peptide and a PEG moiety, each bearing a special functionality that is mutually reactive toward the other. The peptides can be easily prepared with conventional solid phase synthesis (see, for example, FIGS. 5 and 6 and the accompanying text herein). The peptides are “preactivated” with an appropriate functional group at a specific site. The precursors are purified and fully characterized prior to reacting with the PEG moiety. Ligation of the peptide with PEG usually takes place in aqueous phase and can be easily monitored by reverse phase analytical HPLC. The PEGylated peptides can be easily purified by preparative HPLC and characterized by analytical HPLC, amino acid analysis and laser desorption mass spectrometry.

[0614] PEG is a well-known, water soluble polymer that is commercially available or can be prepared by ring-opening polymerization of ethylene glycol according to methods well known in the art (Sandler and Karo, Polymer Synthesis, Academic Press, New York, Vol. 3, pages 138-161). In the present application, the term “PEG” is used broadly to encompass any polyethylene glycol molecule, in mono-, bi-, or poly-functional form, without regard to size or to modification at an end of the PEG, and can be represented by the formula:

X-O(CH₂CH₂O)ₙ₋₁CH₂CH₂OH, (I)

where n is 20 to 2300 and X is H or a terminal modification, e.g., a C₁₋₄ alkyl.

[0615] In some useful embodiments, a PEG used in the invention terminates on one end with hydroxy or methoxy, i.e., X is H or CH₃ (“methoxy PEG”). It is noted that the other end of the PEG, which is shown in formula (I) terminating in OH, covalently attaches to an activating moiety via an ether oxygen bond, an amine linkage, or amide linkage. When used in a chemical structure, the term “PEG” includes the formula (I) above without the hydrogen of the hydroxyl group shown, leaving the oxygen available to react with a free carbon atom of a linker to form an ether bond. More specifically, in order to conjugate PEG to a peptide, the peptide must be reacted with PEG in an “activated” form. Activated PEG can be represented by the formula:

(PEG)-(A) (II)

where PEG (defined supra) covalently attaches to a carbon atom of the activation moiety (A) to form an ether bond, an amine linkage, or amide linkage, and (A) contains a reactive group which can react with an amino, azido, alkyne, imino, maleimido, N-succinimidyl, carboxyl, aminooxy, seleno, or thiol group on an amino acid residue of a peptide or a linker moiety covalently attached to the peptide, e.g., the toxin peptide analog.

[0616] Techniques for the preparation of activated PEG and its conjugation to biologically active peptides are well known in the art. (E.g., see U.S. Pat. Nos. 5,643,575, 5,919,455, 5,932,462, and 5,990,237; Kinstler et al., N-terminally chemically modified protein compositions and methods, U.S. Pat. Nos. 5,985,265, and 5,824,784; Thompson et al., PEGylation of polypeptides, EP 0575545 B1; Petit, Site specific protein modification, U.S. Pat. Nos. 6,451,986, and 6,548,644; S. Herman et al., Poly(ethylene glycol) with reactive endgroups: I. Modification of proteins, J. Bioactive Compatible Polymers, 10:145-187 (1995); Y. Lu et al., PEGylated peptides III: Solid-phase synthesis with PEGylating reagents of varying molecular weight: synthesis of multiply PEGylated peptides, Reactive Polymers, 22:221-229 (1994); A. M. Felix et al., PEGylated Peptides IV: Enhanced biological activity of site-directed PEGylated GRF analogs, Int. J. Peptide Protein Res., 46:253-264 (1995); A. M. Felix, Site-specific poly(ethylene glycol)ylation of peptides, ACS Symposium Series 680(poly(ethylene glycol)): 218-238 (1997); Y. Ikeda et al., Polyethylene glycol derivatives, their modified peptides, methods for producing them and use of the modified peptides, EP 0473084 B1; G. E. Means et al., Selected techniques for the modification of protein side chains, in: Chemical modification of proteins, Holden Day, Inc., 219 (1971)).

[0617] Activated PEG, such as PEG-aldehydes or PEG-aldehyde hydrates, can be chemically synthesized by known means or obtained from commercial sources, e.g., Shearwater Polymers, (Huntsville, Ala.) or Enzon, Inc. (Piscataway, N.J.).

[0618] An example of a useful activated PEG for purposes of the present invention is a PEG-aldehyde compound (e.g., a methoxy PEG-aldehyde), such as PEG-propionaldehyde, which is commercially available from Shearwater Polymers (Huntsville, Ala.). PEG-propionaldehyde is represented by the formula PEG-CH₂CH₂CHO. (See, e.g., U.S. Pat. No. 5,252,714). Also included within the meaning of “PEG aldehyde compound” are PEG aldehyde hydrates, e.g., PEG acetaldehyde hydrate and PEG bis aldehyde hydrate, which latter yields a bifunctionally activated structure. (See., e.g., Bentley et al., Poly(ethylene glycol) aldehyde hydrates and related polymers and applications in modifying amines, U.S. Pat. No. 5,990,237) (See., e.g., Bentley et al., Poly(ethylene glycol) aldehyde hydrates and related polymers and applications in modifying amines, U.S. Pat. No. 5,990,237). An activated multi-branched PEG-aldehyde compound can be used (PEG derivatives comprising multiple arms to give divalent, trivalent, tetravalent, octavalent constructs). Using a 4-arm PEG derivative four (4) toxin peptide analogs are attached to each PEG molecule. For example, in accordance with the present invention, the toxin peptide analog can be conjugated to a polyethylene glycol (PEG) at 1, 2, 3 or 4 amino functionalized sites of the PEG.

[0619] In being conjugated in accordance with the inventive method, the polyethylene glycol (PEG), as described herein, is covalently bound by reductive amination directly to at least one solvent-exposed free amine moiety of an amino acid residue of the toxin peptide analog itself. In some embodiments of the inventive method, the toxin peptide analog is conjugated to a PEG at one or more primary or secondary amines on the toxin peptide analog, or to two PEG groups at a single primary amine site on the toxin peptide analog (e.g., this can occur when the reductive amination reaction involves the presence of excess PEG-aldehyde compound). We have observed that when PEGylation by reductive amination is at a primary amine on the peptide, it is not uncommon to have amounts (1 to 100% range) of reaction product that have two or more PEGs present per molecule, and if the desired PEGylation product is one with only one PEG per molecule, then this “over-PEGylation” may be undesirable. When PEGylated product with a single PEG per PEGylation product molecule is desired, an embodiment of the inventive method can be employed that involves PEGylation using secondary amines of the pharmacologically active peptide, because only one PEG group per molecule will be transferred in the reductive amination reaction.

[0620] Amino acid residues that can provide a primary amine moiety include residues of lysine, homolysine, ornithine, α,β-diaminopropionic acid (Dap), α,β-diaminopropionoic acid (Dpr), and α,γ-diaminobutyric acid (Dab), aminobutyric acid (Abu), and α-amino-isobutyric acid (Aib). The polypeptide N-terminus also provides a useful α-amino group for PEGylation. Amino acid residues that can provide a secondary amine moiety include ε-N-alkyl lysine, α-N-alkyl lysine, δ-N-alkyl ornithine, α-N-alkyl ornithine, or an N-terminal proline, where the alkyl is C₁ to C₆.

[0621] Another useful activated PEG for generating the PEGylated toxin peptide analogs of the present invention is a PEG-maleimide compound, such as, but not limited to, a methoxy PEG-maleimide, such as maleimido monomethoxy PEG, are particularly useful for generating the PEG-conjugated peptides of the invention. (E.g., Shen, N-maleimidyl polymer derivatives, U.S. Pat. No. 6,602,498; C. Delgado et al., The uses and properties of PEG-linked proteins., Crit. Rev. Therap. Drug Carrier Systems, 9:249-304 (1992); S. Zalipsky et al., Use of functionalized polyethylene glycol)s for modification of polypeptides, in: Poly(ethylene glycol) chemistry: Biotechnical and biomedical applications (J. M. Harris, Editor, Plenum Press: New York, 347-370 (1992); S. Herman et al., Poly(ethylene glycol) with reactive endgroups: I. Modification of proteins, J. Bioactive Compatible Polymers, 10:145-187 (1995); P. J. Shadle et al., Conjugation of polymer to colony stimulating factor-1, U.S. Pat. No. 4,847,325; G. Shaw et al., Cysteine added variants IL-3 and chemical modifications thereof, U.S. Pat. No. 5,166,322 and EP 0469074 B1; G. Shaw et al., Cysteine added variants of EPO and chemical modifications thereof, EP 0668353 A1; G. Shaw et al., Cysteine added variants G-CSF and chemical modifications thereof, EP 0668354 A1; N. V. Katre et al., Interleukin-2 muteins and polymer conjugation thereof, U.S. Pat. No. 5,206,344; R. J. Goodson and N. V. Katre, Site-directed pegylation of recombinant interleukin-2 at its glycosylation site, Biotechnology, 8:343-346 (1990)).

[0622] A polyethylene glycol) vinyl sulfone is another useful activated PEG for generating the PEG-conjugated toxin peptide analogs of the present invention by conjugation at thiolated amino acid residues, e.g., at C residues. (E.g., M. Morpurgo et al., Preparation and characterization of polyethylene glycol) vinyl sulfone, Bioconj. Chem., 7:363-368 (1996); see also Harris, Functionalization of polyethylene glycol for formation of active sulfone-terminated PEG derivatives for binding to proteins and biologically compatible materials, U.S. Pat. Nos. 5,446,090; 5,739,208; 5,900,461; 6,610,281 and 6,894,025; and Harris, Water soluble active sulfones of polyethylene glycol), WO 95/13312 A1). Another activated form of PEG that is useful in accordance with the present invention, is a PEG-N-hydroxysuccinimide ester compound, for example, methoxy PEG-N-hydroxysuccinimidyl (NHS) ester.

[0623] Heterobifunctionally activated forms of PEG are also useful. (See, e.g., Thompson et al., PEGylation reagents and biologically active compounds formed therewith, U.S. Pat. No. 6,552,170).

[0624] In still other embodiments of the inventive method of producing a composition of matter, the toxin peptide analog is reacted by known chemical techniques with an activated PEG compound, such as but not limited to, a thiol-activated PEG compound, a diol-activated PEG compound, a PEG-hydrazide compound, a PEG-oxyamine compound, or a PEG-bromoacetyl compound. (See, e.g., S. Herman, Polyethylene glycol) with Reactive Endgroups: I. Modification of Proteins, J. Bioactive and Compatible Polymers, 10:145-187 (1995); S. Zalipsky, Chemistry of Polyethylene Glycol Conjugates with Biologically Active Molecules, Advanced Drug Delivery Reviews, 16:157-182 (1995); R. Greenwald et al., Polyethylene glycol) conjugated drugs and prodrugs: a comprehensive review, Critical Reviews in Therapeutic Drug Carrier Systems, 17:101-161 (2000)).

[0625] An even more preferred activated PEG for generating the PEG-conjugated toxin peptide analogs of the present invention is a multivalent PEG having more than one activated residues. Preferred multivalent PEG moieties include, but are not limited to, those shown below:

[chemical structure]

[chemical structure]

[0626] In still other embodiments of making the composition of matter, the inventive toxin peptide analog is reacted by known chemical techniques with an activated multi-branched PEG compound (PEG derivatives comprising multiple arms to give divalent, trivalent, tetravalent, octavalent constructs), such as but not limited to, pentaerythritol tetra-polyethyleneglycol ether. Functionalization and activated derivatives, such as, but not limited to, N-succinimidyloxycarbonyl)propyl, p-nitrophenyloxycarbonyl, (—CO₂-p-C₆H₄NO₂), 3-(N-maleimido)propanamido, 2-sulfanylethyl, and 3-aminopropyl. Using a 4-arm PEG derivative, four toxin peptide analogs are attached to each PEG molecule. For example, in accordance with the present invention, the toxin peptide analog can be conjugated to a polyethylene glycol (PEG) at:

(a) 1, 2, 3 or 4 amino functionalized sites of the PEG;
(b) 1, 2, 3 or 4 thiol functionalized sites of the PEG;
(c) 1, 2, 3 or 4 maleimido functionalized sites of the PEG;
(d) 1, 2, 3 or 4 N-succinimidyl functionalized sites of the PEG;
(e) 1, 2, 3 or 4 carboxyl functionalized sites of the PEG; or
(f) 1, 2, 3 or 4 p-nitrophenyloxycarbonyl functionalized sites of the PEG.

[0627] The smallest practical size of PEG is about 500 Daltons (Da), below which PEG becomes toxic. Above about 500 Da, any molecular mass for a PEG can be used as practically desired, e.g., from about 1,000 Daltons (Da) to 100,000 Da (n is 20 to 2300). The number of PEG monomers (n) is approximated from the average molecular mass using a MW=44 Da for each monomer. It is preferred that the combined molecular mass of PEG on an activated linker is suitable for pharmaceutical use. Thus, the combined molecular mass of the PEG molecule should not exceed about 100,000 Da. In some embodiments, the combined or total average molecular mass of PEG used in a PEG-conjugated toxin peptide analog of the present invention is from about 3,000 Da to 60,000 Da (total n is from 70 to 1,400), more preferably from about 10,000 Da to 40,000 Da (total n is about 230 to about 910). The most preferred combined mass for PEG is from about 20,000 Da to 30,000 Da (total n is about 450 to about 680).

[0628] It will be appreciated that “multimers” of the composition of matter can be made, since the half-life extending moiety employed for conjugation to the toxin peptide analog (with or without an intervening linker moiety) can be multivalent (e.g., bivalent, trivalent, tetravalent or a higher order valency) as to the number of amino acid residues at which the half-life extending moiety can be conjugated. In some embodiments the peptide portion of the inventive composition of matter can be multivalent (e.g., bivalent, trivalent, tetravalent or a higher order valency), and, thus, some “multimers” of the inventive composition of matter may have more that one half life extending moiety. Consequently, it is possible by the inventive method of producing a composition of matter to produce a variety of conjugated half-life extending moiety peptide structures. By way of example, a univalent half-life extending moiety and a univalent peptide will produce a 1:1 conjugate; a bivalent peptide and a univalent half-life extending moiety may form conjugates wherein the peptide conjugates bear two half-life extending moiety moieties, whereas a bivalent half-life extending moiety and a univalent peptide may produce species where two peptide entities are linked to a single half-life extending moiety; use of higher-valence half-life extending moiety can lead to the formation of clusters of peptide entities bound to a single half-life extending moiety, whereas higher-valence peptides may become encrusted with a plurality of half-life extending moiety moieties. By way of further example, if the site of conjugation of a multivalent half-life extending moiety to the toxin peptide analog is a cysteine or other aminothiol the methods disclosed by D'Amico et al. may be employed (D'Amico et al., Method of conjugating aminothiol containing molecules to vehicles, published as US 2006/0199812, which application is incorporated herein by reference in its entirety).

[0629] The peptide moieties may have more than one reactive group which will react with the activated half-life extending moiety and the possibility of forming complex structures must always be considered; when it is desired to form simple structures such as 1:1 adducts of half-life extending moiety and peptide, or to use bivalent half-life extending moiety to form peptide:half-life extending moiety:peptide adducts, it will be beneficial to use predetermined ratios of activated half-life extending moiety and peptide material, predetermined concentrations thereof and to conduct the reaction under predetermined conditions (such as duration, temperature, pH, etc.) so as to form a proportion of the described product and then to separate the described product from the other reaction products. The reaction conditions, proportions and concentrations of the reagents can be obtained by relatively simple trial-and-error experiments which are within the ability of an ordinarily skilled artisan with appropriate scaling-up as necessary. Purification and separation of the products is similarly achieved by conventional techniques well known to those skilled in the art.

[0630] Additionally, physiologically acceptable salts of the half-life extending moiety-fused or conjugated to the toxin peptide analogs of this invention are also encompassed within the composition of matter of the present invention.

[0631] The above-described half-life extending moieties and other half-life extending moieties described herein are useful, either individually or in combination, and as further described in the art, for example, in Sullivan et al., Toxin Peptide Therapeutic Agents, US2007/0071764 and Sullivan et al., Toxin Peptide Therapeutic Agents, PCT/US2007/022831, published as WO 2008/088422, which are both incorporated herein by reference in their entireties. The invention encompasses the use of any single species of pharmaceutically acceptable half-life extending moiety, such as, but not limited to, those described herein, in conjugation with the toxin peptide analog, or the use of a combination of two or more like or different half-life extending moieties.

[0632] Linkers

[0633] A “linker moiety” as used herein refers to a biologically acceptable peptidyl or non-peptidyl organic group that is covalently bound to an amino acid residue of a toxin peptide analog or other polypeptide chain (e.g., an immunoglobulin HC or LC or immunoglobulin Fc domain) contained in the inventive composition, which linker moiety covalently joins or conjugates the toxin peptide analog or other polypeptide chain to another peptide or polypeptide chain in the composition, or to a half-life extending moiety. In some embodiments of the composition, a half-life extending moiety, as described herein, is conjugated, i.e., covalently bound directly to an amino acid residue of the toxin peptide analog itself, or optionally, to a peptidyl or non-peptidyl linker moiety (including but not limited to aromatic or aryl linkers) that is covalently bound to an amino acid residue of the toxin peptide analog. The presence of any linker moiety is optional. When present, its chemical structure is not critical, since it serves primarily as a spacer to position, join, connect, or optimize presentation or position of one functional moiety in relation to one or more other functional moieties of a molecule of the inventive composition. The presence of a linker moiety can be useful in optimizing pharamcologial activity of some embodiments of the inventive composition. The linker, if present, can be made up of amino acids linked together by peptide bonds. The linker moiety, if present, can be independently the same or different from any other linker, or linkers, that may be present in the inventive composition. In some embodiments the linker can be a multivalent linker that facilitates multivalent display of toxin peptide analogs of the present invention; multivalent display of such biologically active compounds can increase binding affinity and/or potency through avidity. The in vivo properties of a therapeutic can be altered (i.e., specific targeting, half-life extension, distribution profile, etc.) through conjugation to a polymer or protein.

[0634] Peptidyl Linkers.

[0635] As stated above, the linker moiety, if present (whether within the primary amino acid sequence of the toxin peptide analog, or as a linker for attaching a half-life extending moiety to the toxin peptide analog), can be “peptidyl” in nature (i.e., made up of amino acids linked together by peptide bonds) and made up in length, preferably, of from 1 up to about 40 amino acid residues, more preferably, of from 1 up to about 20 amino acid residues, and most preferably of from 1 to about 10 amino acid residues. Preferably, but not necessarily, the amino acid residues in the linker are from among the twenty canonical amino acids, more preferably, cysteine, glycine, alanine, proline, asparagine, glutamine, and/or serine. Even more preferably, a peptidyl linker is made up of a majority of amino acids that are sterically unhindered, such as glycine, serine, and alanine linked by a peptide bond. It is also desirable that, if present, a peptidyl linker be selected that avoids rapid proteolytic turnover in circulation in vivo. Some of these amino acids may be glycosylated, as is well understood by those in the art. For example, a useful linker sequence constituting a sialylation site is X₁X₂NX₄X₅G (SEQ ID NO:479), wherein X₁, X₂, X₄ and X₅ are each independently any amino acid residue.

[0636] In other embodiments, the 1 to 40 amino acids of the peptidyl linker moiety are selected from glycine, alanine, proline, asparagine, glutamine, and lysine. Preferably, a linker is made up of a majority of amino acids that are sterically unhindered, such as glycine and alanine. Thus, preferred linkers include polyglycines, polyserines, and polyalanines, or combinations of any of these. Some exemplary peptidyl linkers are poly(Gly)₁₋₈, particularly (Gly)₃, (Gly)₄ (SEQ ID NO:480), (Gly)₅ (SEQ ID NO:481) and (Gly) (SEQ ID NO:482), as well as, GlySer and poly(Gly)₄Ser, such as “L15” (GGGGSGGGGSGGGGS; SEQ ID NO:483), poly(Gly-Ala)₂₋₄ and poly(Ala)₁₋₈. Other specific examples of peptidyl linkers include (Gly)₅Lys (SEQ ID NO:484), and (Gly)₅LysArg (SEQ ID NO:485). Other examples of useful peptidyl linkers are: Other examples of useful peptidyl linkers are:

(SEQ ID NO: 486)
(Gly)₃Lys(Gly)₄;
(SEQ ID NO: 487)
(Gly)₃AsnGlySer(Gly)₂;
(SEQ ID NO: 488)
(Gly)₃Cys(Gly)₄;
and
(SEQ ID NO: 489)
GlyProAsnGlyGly.

To explain the above nomenclature, for example, (Gly)₃Lys(Gly)₄ means Gly-Gly-Gly-Lys-Gly-Gly-Gly-Gly (SEQ ID NO:490). Other combinations of Gly and Ala are also useful.

[0637] Other preferred linkers are those identified herein as “L5” (GGGGS; or “G₄S”; SEQ ID NO:491), “L10” (GGGGSGGGGS; SEQ ID NO:492); “L20” (GGGGSGGGGSGGGGSGGGGS; SEQ ID NO:477); “L25” (GGGGSGGGGSGGGGSGGGGSGGGGS; SEQ ID NO:493) and any linkers used in the working examples hereinafter.

[0638] In some embodiments of the compositions of this invention, which comprise a peptide linker moiety, acidic residues, for example, glutamate or aspartate residues, are placed in the amino acid sequence of the linker moiety. Examples include the following peptide linker sequences:

(SEQ ID NO: 494)
GGEGGG;
(SEQ ID NO: 495)
GGEEEGGG;
(SEQ ID NO: 496)
GEEEG;
(SEQ ID NO: 497)
GEEE;
(SEQ ID NO: 498)
GGDGGG;
(SEQ ID NO: 499)
GGDDDGG;
(SEQ ID NO: 500)
GDDDG;
(SEQ ID NO: 501)
GDDD;
(SEQ ID NO: 502)
GGGGSDDSDEGSDGEDGGGGS;
(SEQ ID NO: 503)
WEWEW;
(SEQ ID NO: 504)
FEFEF;
(SEQ ID NO: 505)
EEEWWW;
(SEQ ID NO: 506)
EEEFFF;
(SEQ ID NO: 507)
WWEEEWW;
or
(SEQ ID NO: 508)
FFEEEFF.

[0639] In other embodiments, the linker constitutes a phosphorylation site, e.g., X₁X₂YX₄X₅G (SEQ ID NO:509), wherein X₁, X₂, X₄, and X₅ are each independently any amino acid residue; X₁X₂SX₄X₅G (SEQ ID NO:510), wherein X₁, X₂, X₄ and X₅ are each independently any amino acid residue; or X₁X₂TX₄X₅G (SEQ ID NO:511), wherein X₁, X₂, X₄ and X₅ are each independently any amino acid residue.

[0640] The linkers shown here are exemplary; peptidyl linkers within the scope of this invention may be much longer and may include other residues. A peptidyl linker can contain, e.g., a cysteine, another thiol, or nucleophile for conjugation with a half-life extending moiety. In another embodiment, the linker contains a cysteine or homocysteine residue, or other 2-amino-ethanethiol or 3-amino-propanethiol moiety for conjugation to maleimide, iodoacetaamide or thioester, functionalized half-life extending moiety.

[0641] Another useful peptidyl linker is a large, flexible linker comprising a random Gly/Ser/Thr sequence, for example: GSGSATGGSGSTASSGSGSATH (SEQ ID NO:512) or HGSGSATGGSGSTASSGSGSAT (SEQ ID NO:513), that is estimated to be about the size of a 1 kDa PEG molecule. Alternatively, a useful peptidyl linker may be comprised of amino acid sequences known in the art to form rigid helical structures (e.g., Rigid linker: -AEAAAKEAAAKEAAAKAGG-//SEQ ID NO:514). Additionally, a peptidyl linker can also comprise a non-peptidyl segment such as a 6 carbon aliphatic molecule of the formula —CH₂—CH₂—CH₂—CH₂—CH₂—CH₂—. The peptidyl linkers can be altered to form derivatives as described herein.

[0642] Non-Peptidyl Linkers.

[0643] Optionally, a non-peptidyl linker moiety is also useful for conjugating the half-life extending moiety to the peptide portion of the half-life extending moiety-conjugated toxin peptide analog. For example, alkyl linkers such as —NH—(CH₂)ₛ—C(O)—, wherein s=2-20 can be used. These alkyl linkers may further be substituted by any non-sterically hindering group such as lower alkyl (e.g., C₁-C₆) lower acyl, halogen (e.g., Cl, Br), CN, NH₂, phenyl, etc. Exemplary non-peptidyl linkers are PEG linkers (e.g., shown below):

[chemical structure]

wherein n is such that the linker has a molecular weight of about 100 to about 5000 Daltons (Da), preferably about 100 to about 500 Da.

[0644] In one embodiment, the non-peptidyl linker is aryl. The linkers may be altered to form derivatives in the same manner as described herein. In addition, PEG moieties may be attached to the N-terminal amine or selected side chain amines by either reductive alkylation using PEG aldehydes or acylation using hydroxysuccinimido or carbonate esters of PEG, or by thiol conjugation.

[0645] “Aryl” is phenyl or phenyl vicinally-fused with a saturated, partially-saturated, or unsaturated 3-, 4-, or 5 membered carbon bridge, the phenyl or bridge being substituted by 0, 1, 2 or 3 substituents selected from C₁₋₈ alkyl, C₁₋₄ haloalkyl or halo. “Heteroaryl” is an unsaturated 5, 6 or 7 membered monocyclic or partially-saturated or unsaturated 6-, 7-, 8-, 9-, 10- or 11 membered bicyclic ring, wherein at least one ring is unsaturated, the monocyclic and the bicyclic rings containing 1, 2, 3 or 4 atoms selected from N, O and S, wherein the ring is substituted by 0, 1, 2 or 3 substituents selected from C₁₋₈ alkyl, C₁₋₄ haloalkyl and halo.

[0646] Non-peptide portions of the inventive composition of matter, such as non-peptidyl linkers or non-peptide half-life extending moieties can be synthesized by conventional organic chemistry reactions.

[0647] Multivalent Linkers.

[0648] The linker size/length, flexibility, stoichiometry, stability, etc. can have a tremendous impact on the overall activity profile of the conjugate. We have designed and prepared a series of multivalent bifunctional linkers of varied lengths that can be loaded with multiple copies of a molecule of therapeutic interest and then site specifically conjugated to a protein of interest. The utility of these linker molecules has been demonstrated in improving the potency of Nav1.7 inhibitory peptide conjugates, e.g., with Fc domain and IgG conjugates, but they are useful in the development of other peptide-large molecule, small molecule-large molecule, or peptide-small molecule conjugates.

[0649] The multivalent linkers described herein are peptidyl or peptido-mimetic in nature and serve to control the distance between the inhibitor and LM, as well as the geometric relationship between the two by virtue of the conformation of the linker (i.e. extended, partially extended, helical, beta-hairpin, rigid, or flexible). The linkers are chemically differentiated on either end to accommodate orthogonal coupling chemistries (i.e. azide “Click”, amide coupling, thioether formation by alkylation with maleimide or haloacetamide, oxime formation, reductive amination, etc.). Generic examples of linkers are shown in FIG. 77 and FIG. 78A-B.

[0650] Other peptides with well-defined secondary structure may provide the necessary rigidity to limit unfavorable interactions between the Nav1.7 inhibitory toxin peptide analog and the remainder of the construct. A general structure (KXXXD//SEQ ID NO:515, where K is linked to D through the amino acid side-chains) for cyclic alpha-helical peptides from Harrison, et. al. Proc. Natl. Acad. Sci. 2010, 107, 11686 may be modified to give desirable properties. X=alanine is the starting point of this reference, but X may be any amino acid for the purposes of the present invention. Additionally, the individual 5 amino-acid subunits may be spaced with other amino acids to affect properties of the overall molecule. (KXXXD)n(X)y where K and D have been cyclized. (See FIG. 84A-E).

[0651] Some additional embodiments involve using a beta-hairpin peptide as a rigid linker between the toxin peptide analog and half life extending moiety. (See, e.g., Russel, et. al. J. Am. Chem. Soc. 2003, 125:388 and Ciani, et. al. J. Am. Chem. Soc. 2003, 125:9038). Modifications can be made at either end of the peptide and the asparagine residue in the middle of each sequence. (See, FIG. 85). Each of the above linkers can be modified with suitable functional groups to allow conjugation to both the toxin peptide analog and the (protein) half life extending moiety. This can be through a bromoacetamide on one portion of the molecule and an azide on another portion of the molecule, but other suitable functionalities can also be used. The multivalent linkers can be covalently linked to the toxin peptide analog and half life extending moiety through either their C or N termini or via any of the side-chains of the peptide sequence.

[0652] Other embodiments of the multivalent linker comprise a rigid polyheterocyclic core of controlled length. The linkers are chemically differentiated on either end to accommodate orthogonal coupling chemistries (i.e. azide “Click”, amide coupling, thioether formation by alkylation with maleimide or haloacetamide, oxime formation, reductive amination, etc.). (See, FIG. 86A-B).

[0653] Still other embodiments of the multivalent linkers described herein are comprised of a multivalent core to which two or more toxin peptide analogs can be covalently linked directly, or indirectly through PEG or peptidyl or peptido-mimetic linkers, such as those described above, to a half life extending moiety. These linkers are chemically differentiated on either end to accommodate orthogonal coupling chemistries (i.e. azide “Click”, amide coupling, thioether formation by alkylation with maleimide or haloacetamide, oxime formation, reductive amination, etc.). (See, e.g., FIGS. 87A-B, FIG. 88, FIGS. 89A-B, and FIG. 90).

[0654] Additional embodiments of the multivalent linkers are described in Example 10 herein.

[0655] The above is merely illustrative and not an exhaustive treatment of the kinds of linkers that can optionally be employed in accordance with the present invention.

[0656] Compositions of this invention incorporating the isolated polypeptide antagonists of the voltage-gated sodium channel Na_{V}1.3 and/or Na_{V}1.7, in particular JzTx-V toxin peptide analogs of the present invention, whether or not conjugated to a half-life extending moiety, are useful as therapeutic agents in the treatment of pain, for example in humans. Clinical genetic information, replicated independently by several groups, shows unambiguously that the product of the Nav1.7 (SCN9A) gene is a key control point for the perception of pain. In humans, loss-of-function truncation mutations of the gene lead to complete insensitivity to all forms of pain measured, whereas the human chronic pain syndromes primary erythromelalgia and paroxysmal extreme pain disorder are caused by gain-of-function mutations in Na_{V}1.7 that lead to easier or more prolonged Nav1.7 channel opening. Remarkably, no other major neurological abnormalities are present in patients carrying either truncation or gain-of-function mutations in Na_{V}1.7 (Goldberg et al., Clin Genet 71:311-319 (2007); Cox et al., Nature 444:894-898 (2006); Ahmad et al., Hum Mol Genet 16:2114-2121 (2007); Fertleman et al., Neurology 69:586-595 (2007)). Accordingly, a therapeutic that blocks Na_{V}1.7 can be expected to be of great utility for the treatment of pain in humans.

[0657] Specific clinical chronic pain syndromes include, but are not limited to, pain associated with, or due to, cancer, chemotherapy, osteoarthritis, fibromyalgia, primary erythromelalgia, post-herpetic neuralgia, painful diabetic neuropathy, idiopathic painful neuropathy, neuromas, paroxysmal extreme pain disorder, migraine, trigeminal neuralgia, orofacial pain, cluster or other headaches, complex regional pain syndrome (CRPS), failed back surgery syndrome, sciatica (including lower back pain), interstitial cystitis and pelvic pain, inflammation-induced pain including cellulitis, and rheumatic or joint pain. A Na_{V}1.7 inhibitor can also have great utility for treatment of acute or persistent pain, including but not limited to pain following trauma, burns, or surgery. Notably, inhibition of Na_{V}1.7 is not expected to result in the adverse effects on cognition and on the gastrointestinal system that limit the use of opioid drugs. Again unlike opioids, Na_{V}1.7 inhibitors should not produce respiratory depression, patient tolerance, or addiction. Moreover, Na_{V}1.7 expression in humans and in non-human primates is overwhelmingly in the peripheral nervous system, with little or no message or protein in the brain or spinal cord (Ahmad et al., Hum Mol Genet 16:2114-2121, 2007). Consistent with these studies, our data show that among CNS areas from post-mortem humans examined with in situ hybridization, message RNA for Na_{V}1.7 was found only in light amounts in hypothalamic nuclei and in ventral motor areas of the spinal cord and spinal ependyma, areas with no known involvement in the pain response. By contrast, no Na_{V}1.7 was found in cerebral cortex, cerebellum, adrenal medulla, pituitary, or dorsal or deep regions of lumbar spinal cord. Strong Na_{V}1.7 expression was found in peripheral nerves including dorsal root ganglia, trigeminal ganglia, and myenteric plexes of the stomach and intestine. (See, Murray et al., Potent and selective inhibitors of Nav1.3 and Nav1.7, WO 2012/125973 A2, at FIGS. 13A-F therein). This suggests that an inhibitor of Na_{V}1.7 would exert analgesic efficacy via the peripheral nervous system without a need for CNS penetrance. As peptides generally do not cross the blood-brain barrier, a peptide inhibitor thus has an advantage over small molecules with some CNS-penetrance in that a peptide should not produce common off-target side effects mediated by the brain such as dizziness, confusion, or sedation.

[0658] Accordingly, the present invention also relates to the use of one or more of the inventive compositions of matter in the manufacture of a medicament for the treatment or prevention of a disease, disorder, or other medical condition described herein, for example, but not limited to, chronic pain, acute pain, or persistent pain, or any of the pain syndromes described herein.

[0659] Such pharmaceutical compositions can be configured for administration to a patient by a wide variety of delivery routes, e.g., an intravascular delivery route such as by injection or infusion, subcutaneous (“s.c.”), intravenous (“i.v.”), intramuscular, intraperitoneal (“i.p.”), epidural, or intrathecal delivery routes, or for oral, enteral, pulmonary (e.g., inhalant), intranasal, transmucosal (e.g., sublingual administration), transdermal or other delivery routes and/or forms of administration known in the art. Delivery of a drug or pharmaceutical composition containing a JzTx-V peptide analog, or other compositions of matter of the invention, may take place via standard injectable modalities, whether self-administered or in hospital setting, or also via an implantable delivery pump to achieve the most accurate dosing and the most stable plasma exposure levels. The inventive pharmaceutical compositions may be prepared in liquid form, or may be in dried powder form, such as lyophilized form, or crystalline form. For oral or enteral use, the pharmaceutical compositions can be configured, for example, as tablets, troches, lozenges, aqueous or oily suspensions, dispersible powders or granules, emulsions, hard or soft capsules, syrups, elixirs or enteral formulas.

[0660] Pharmaceutical Compositions

[0661] In General.

[0662] The present invention also provides pharmaceutical compositions comprising the inventive composition of matter and a pharmaceutically acceptable carrier. Such pharmaceutical compositions can be configured for administration to a patient by a wide variety of delivery routes, e.g., an intravascular delivery route such as by injection or infusion, subcutaneous, intramuscular, intraperitoneal, epidural, or intrathecal delivery routes, or for oral, enteral, pulmonary (e.g., inhalant), intranasal, transmucosal (e.g., sublingual administration), transdermal or other delivery routes and/or forms of administration known in the art. The inventive pharmaceutical compositions may be prepared in liquid form, or may be in dried powder form, such as lyophilized form. For oral or enteral use, the pharmaceutical compositions can be configured, for example, as tablets, troches, lozenges, aqueous or oily suspensions, dispersible powders or granules, emulsions, hard or soft capsules, syrups, elixirs or enteral formulas.

[0663] In the practice of this invention the “pharmaceutically acceptable carrier” is any physiologically tolerated substance known to those of ordinary skill in the art useful in formulating pharmaceutical compositions, including, any pharmaceutically acceptable diluents, excipients, dispersants, binders, fillers, glidants, anti-frictional agents, compression aids, tablet-disintegrating agents (disintegrants), suspending agents, lubricants, flavorants, odorants, sweeteners, permeation or penetration enhancers, preservatives, surfactants, solubilizers, emulsifiers, thickeners, adjuvants, dyes, coatings, encapsulating material(s), and/or other additives singly or in combination. Such pharmaceutical compositions can include diluents of various buffer content (e.g., Tris-HCl, acetate, phosphate), pH and ionic strength; additives such as detergents and solubilizing agents (e.g., Tween® 80, Polysorbate 80), anti-oxidants (e.g., ascorbic acid, sodium metabisulfite), preservatives (e.g., Thimersol®, benzyl alcohol) and bulking substances (e.g., lactose, mannitol); incorporation of the material into particulate preparations of polymeric compounds such as polylactic acid, polyglycolic acid, etc. or into liposomes. Hyaluronic acid can also be used, and this can have the effect of promoting sustained duration in the circulation. Such compositions can influence the physical state, stability, rate of in vivo release, and rate of in vivo clearance of the present proteins and derivatives. See, e.g., Remington's Pharmaceutical Sciences, 18th Ed. (1990, Mack Publishing Co., Easton, Pa. 18042) pages 1435-1712, which are herein incorporated by reference in their entirety. The compositions can be prepared in liquid form, or can be in dried powder, such as lyophilized form. Implantable sustained release formulations are also useful, as are transdermal or transmucosal formulations. Additionally (or alternatively), the present invention provides compositions for use in any of the various slow or sustained release formulations or microparticle formulations known to the skilled artisan, for example, sustained release microparticle formulations, which can be administered via pulmonary, intranasal, or subcutaneous delivery routes. (See, e.g., Murthy et al., Injectable compositions for the controlled delivery of pharmacologically active compound, U.S. Pat. No. 6,887,487; Manning et al., Solubilization of pharmaceutical substances in an organic solvent and preparation of pharmaceutical powders using the same, U.S. Pat. Nos. 5,770,559 and 5,981,474; Lieberman et al., Lipophilic complexes of pharmacologically active inorganic mineral acid esters of organic compounds, U.S. Pat. No. 5,002,936; Gen, Formative agent of protein complex, US 2002/0119946 A1; Goldenberg et al., Sustained release formulations, WO 2005/105057 A1).

[0664] One can dilute the inventive compositions or increase the volume of the pharmaceutical compositions of the invention with an inert material. Such diluents can include carbohydrates, especially, mannitol, α-lactose, anhydrous lactose, cellulose, sucrose, modified dextrans and starch. Certain inorganic salts may also be used as fillers, including calcium triphosphate, magnesium carbonate and sodium chloride. Some commercially available diluents are Fast-Flo, Emdex, STA-Rx 1500, Emcompress and Avicell.

[0665] A variety of conventional thickeners are useful in creams, ointments, suppository and gel configurations of the pharmaceutical composition, such as, but not limited to, alginate, xanthan gum, or petrolatum, may also be employed in such configurations of the pharmaceutical composition of the present invention. A permeation or penetration enhancer, such as polyethylene glycol monolaurate, dimethyl sulfoxide, N-vinyl-2-pyrrolidone, N-(2-hydroxyethyl)-pyrrolidone, or 3-hydroxy-N-methyl-2-pyrrolidone can also be employed. Useful techniques for producing hydrogel matrices are known. (E.g., Feijen, Biodegradable hydrogel matrices for the controlled release of pharmacologically active agents, U.S. Pat. No. 4,925,677; Shah et al., Biodegradable pH/thermosensitive hydrogels for sustained delivery of biologically active agents, WO 00/38651 A1). Such biodegradable gel matrices can be formed, for example, by crosslinking a proteinaceous component and a polysaccharide or mucopolysaccharide component, then loading with the inventive composition of matter to be delivered.

[0666] Liquid pharmaceutical compositions of the present invention that are sterile solutions or suspensions can be administered to a patient by injection, for example, intramuscularly, intrathecally, epidurally, intravascularly (e.g., intravenously or intraarterially), intraperitoneally or subcutaneously. (See, e.g., Goldenberg et al., Suspensions for the sustained release of proteins, U.S. Pat. No. 6,245,740 and WO 00/38652 A1). Sterile solutions can also be administered by intravenous infusion. The inventive composition can be included in a sterile solid pharmaceutical composition, such as a lyophilized powder, which can be dissolved or suspended at a convenient time before administration to a patient using sterile water, saline, buffered saline or other appropriate sterile injectable medium.

[0667] Implantable sustained release formulations are also useful embodiments of the inventive pharmaceutical compositions. For example, the pharmaceutically acceptable carrier, being a biodegradable matrix implanted within the body or under the skin of a human or non-human vertebrate, can be a hydrogel similar to those described above. Alternatively, it may be formed from a poly-alpha-amino acid component. (Sidman, Biodegradable, implantable drug delivery device, and process for preparing and using same, U.S. Pat. No. 4,351,337). Other techniques for making implants for delivery of drugs are also known and useful in accordance with the present invention.

[0668] In powder forms, the pharmaceutically acceptable carrier is a finely divided solid, which is in admixture with finely divided active ingredient(s), including the inventive composition. For example, in some embodiments, a powder form is useful when the pharmaceutical composition is configured as an inhalant. (See, e.g., Zeng et al., Method of preparing dry powder inhalation compositions, WO 2004/017918; Trunk et al., Salts of the CGRP antagonist BIBN4096 and inhalable powdered medicaments containing them, U.S. Pat. No. 6,900,317).

[0669] One can dilute or increase the volume of the compound of the invention with an inert material. These diluents could include carbohydrates, especially mannitol, α-lactose, anhydrous lactose, cellulose, sucrose, modified dextrans and starch. Certain inorganic salts can also be used as fillers including calcium triphosphate, magnesium carbonate and sodium chloride. Some commercially available diluents are Fast-Flo™ Emdex™, STA-Rx™ 1500, Emcompress™ and Avicell™.

[0670] Disintegrants can be included in the formulation of the pharmaceutical composition into a solid dosage form. Materials used as disintegrants include but are not limited to starch including the commercial disintegrant based on starch, Explotab™. Sodium starch glycolate, Amberlite™, sodium carboxymethylcellulose, ultramylopectin, sodium alginate, gelatin, orange peel, acid carboxymethyl cellulose, natural sponge and bentonite can all be used. Insoluble cationic exchange resin is another form of disintegrant. Powdered gums can be used as disintegrants and as binders and these can include powdered gums such as agar, Karaya or tragacanth. Alginic acid and its sodium salt are also useful as disintegrants.

[0671] Binders can be used to hold the therapeutic agent together to form a hard tablet and include materials from natural products such as acacia, tragacanth, starch and gelatin. Others include methyl cellulose (MC), ethyl cellulose (EC) and carboxymethyl cellulose (CMC). Polyvinyl pyrrolidone (PVP) and hydroxypropylmethyl cellulose (HPMC) could both be used in alcoholic solutions to granulate the therapeutic. An antifrictional agent can be included in the formulation of the therapeutic to prevent sticking during the formulation process. Lubricants can be used as a layer between the therapeutic and the die wall, and these can include but are not limited to; stearic acid including its magnesium and calcium salts, polytetrafluoroethylene (PTFE), liquid paraffin, vegetable oils and waxes. Soluble lubricants can also be used such as sodium lauryl sulfate, magnesium lauryl sulfate, polyethylene glycol of various molecular weights, Carbowax 4000 and 6000.

[0672] Glidants that might improve the flow properties of the drug during formulation and to aid rearrangement during compression might be added. The glidants can include starch, talc, pyrogenic silica and hydrated silicoaluminate.

[0673] To aid dissolution of the compound of this invention into the aqueous environment a surfactant might be added as a wetting agent. Surfactants can include anionic detergents such as sodium lauryl sulfate, dioctyl sodium sulfosuccinate and dioctyl sodium sulfonate. Cationic detergents might be used and could include benzalkonium chloride or benzethonium chloride. The list of potential nonionic detergents that could be included in the formulation as surfactants are lauromacrogol 400, polyoxyl 40 stearate, polyoxyethylene hydrogenated castor oil 10, 50 and 60, glycerol monostearate, polysorbate 40, 60, 65 and 80, sucrose fatty acid ester, methyl cellulose and carboxymethyl cellulose. These surfactants could be present in the formulation of the protein or derivative either alone or as a mixture in different ratios.

[0674] Oral Dosage Forms.

[0675] Also useful are oral dosage forms of the inventive compositions. If necessary, the composition can be chemically modified so that oral delivery is efficacious. Generally, the chemical modification contemplated is the attachment of at least one moiety to the molecule itself, where said moiety permits (a) inhibition of proteolysis; and (b) uptake into the blood stream from the stomach or intestine. Also desired is the increase in overall stability of the compound and increase in circulation time in the body. Moieties useful as covalently attached half-life extending moieties in this invention can also be used for this purpose. Examples of such moieties include: PEG, copolymers of ethylene glycol and propylene glycol, carboxymethyl cellulose, dextran, polyvinyl alcohol, polyvinyl pyrrolidone and polyproline. See, for example, Abuchowski and Davis (1981), Soluble Polymer—Enzyme Adducts, Enzymes as Drugs (Hocenberg and Roberts, eds.), Wiley-Interscience, New York, N.Y., pp 367-83; Newmark, et al. (1982), J. Appl. Biochem. 4:185-9. Other polymers that could be used are poly-1,3-dioxolane and poly-1,3,6-tioxocane. Preferred for pharmaceutical usage, as indicated above, are PEG moieties.

[0676] For oral delivery dosage forms, it is also possible to use a salt of a modified aliphatic amino acid, such as sodium N-(8-[2-hydroxybenzoyl]amino) caprylate (SNAC), as a carrier to enhance absorption of the therapeutic compounds of this invention. The clinical efficacy of a heparin formulation using SNAC has been demonstrated in a Phase II trial conducted by Emisphere Technologies. See U.S. Pat. No. 5,792,451, “Oral drug delivery composition and methods.”

[0677] In one embodiment, the pharmaceutically acceptable carrier can be a liquid and the pharmaceutical composition is prepared in the form of a solution, suspension, emulsion, syrup, elixir or pressurized composition. The active ingredient(s) (e.g., the inventive composition of matter) can be dissolved, diluted or suspended in a pharmaceutically acceptable liquid carrier such as water, an organic solvent, a mixture of both, or pharmaceutically acceptable oils or fats. The liquid carrier can contain other suitable pharmaceutical additives such as detergents and/or solubilizers (e.g., Tween 80, Polysorbate 80), emulsifiers, buffers at appropriate pH (e.g., Tris-HCl, acetate, phosphate), adjuvants, anti-oxidants (e.g., ascorbic acid, sodium metabisulfite), preservatives (e.g., Thimersol, benzyl alcohol), sweeteners, flavoring agents, suspending agents, thickening agents, bulking substances (e.g., lactose, mannitol), colors, viscosity regulators, stabilizers, electrolytes, osmolutes or osmo-regulators. Additives can also be included in the formulation to enhance uptake of the inventive composition. Additives potentially having this property are for instance the fatty acids oleic acid, linoleic acid and linolenic acid.

[0678] Useful are oral solid dosage forms, which are described generally in Remington's Pharmaceutical Sciences (1990), supra, in Chapter 89, which is hereby incorporated by reference in its entirety. Solid dosage forms include tablets, capsules, pills, troches or lozenges, cachets or pellets. Also, liposomal or proteinoid encapsulation can be used to formulate the present compositions (as, for example, proteinoid microspheres reported in U.S. Pat. No. 4,925,673). Liposomal encapsulation can be used and the liposomes can be derivatized with various polymers (e.g., U.S. Pat. No. 5,013,556). A description of possible solid dosage forms for the therapeutic is given in Marshall, K., Modern Pharmaceutics (1979), edited by G. S. Banker and C. T. Rhodes, in Chapter 10, which is hereby incorporated by reference in its entirety. In general, the formulation will include the inventive compound, and inert ingredients that allow for protection against the stomach environment, and release of the biologically active material in the intestine.

[0679] The composition of this invention can be included in the formulation as fine multiparticulates in the form of granules or pellets of particle size about 1 mm. The formulation of the material for capsule administration could also be as a powder, lightly compressed plugs or even as tablets. The therapeutic could be prepared by compression.

[0680] Colorants and flavoring agents can all be included. For example, the protein (or derivative) can be formulated (such as by liposome or microsphere encapsulation) and then further contained within an edible product, such as a refrigerated beverage containing colorants and flavoring agents.

[0681] In tablet form, the active ingredient(s) are mixed with a pharmaceutically acceptable carrier having the necessary compression properties in suitable proportions and compacted in the shape and size desired.

[0682] The powders and tablets preferably contain up to 99% of the active ingredient(s). Suitable solid carriers include, for example, calcium phosphate, magnesium stearate, talc, sugars, lactose, dextrin, starch, gelatin, cellulose, polyvinylpyrrolidine, low melting waxes and ion exchange resins.

[0683] Controlled release formulation can be desirable. The composition of this invention can be incorporated into an inert matrix that permits release by either diffusion or leaching mechanisms e.g., gums. Slowly degenerating matrices can also be incorporated into the formulation, e.g., alginates, polysaccharides. Another form of a controlled release of the compositions of this invention is by a method based on the Oros™ therapeutic system (Alza Corp.), i.e., the drug is enclosed in a semipermeable membrane which allows water to enter and push drug out through a single small opening due to osmotic effects. Some enteric coatings also have a delayed release effect.

[0684] Other coatings can be used for the formulation. These include a variety of sugars that could be applied in a coating pan. The therapeutic agent could also be given in a film-coated tablet and the materials used in this instance are divided into 2 groups. The first are the nonenteric materials and include methylcellulose, ethyl cellulose, hydroxyethyl cellulose, methylhydroxy-ethyl cellulose, hydroxypropyl cellulose, hydroxypropyl-methyl cellulose, sodium carboxymethyl cellulose, providone and the polyethylene glycols. The second group consists of the enteric materials that are commonly esters of phthalic acid.

[0685] A mix of materials might be used to provide the optimum film coating. Film coating can be carried out in a pan coater or in a fluidized bed or by compression coating.

[0686] Pulmonary Delivery Forms.

[0687] Pulmonary delivery of the inventive compositions is also useful. The protein (or derivative) is delivered to the lungs of a mammal while inhaling and traverses across the lung epithelial lining to the blood stream. (Other reports of this include Adjei et al., Pharma. Res. (1990) 7: 565-9; Adjei et al. (1990), Internatl. J. Pharmaceutics 63: 135-44 (leuprolide acetate); Braquet et al. (1989), J. Cardiovasc. Pharmacol. 13 (suppl.5): s.143-146 (endothelin-1); Hubbard et al. (1989), Annals Int. Med. 3: 206-12 (α1-antitrypsin); Smith et al. (1989), J. Clin. Invest. 84: 1145-6 (α1-proteinase); Oswein et al. (March 1990), “Aerosolization of Proteins,” Proc. Symp. Resp. Drug Delivery II, Keystone, Colo. (recombinant human growth hormone); Debs et al. (1988), J. Immunol. 140: 3482-8 (interferon-γ and tumor necrosis factor α) and Platz et al., U.S. Pat. No. 5,284,656 (granulocyte colony stimulating factor).

[0688] Useful in the practice of this invention are a wide range of mechanical devices designed for pulmonary delivery of therapeutic products, including but not limited to nebulizers, metered dose inhalers, and powder inhalers, all of which are familiar to those skilled in the art. Some specific examples of commercially available devices suitable for the practice of this invention are the Ultravent nebulizer, manufactured by Mallinckrodt, Inc., St. Louis, Mo.; the Acorn II nebulizer, manufactured by Marquest Medical Products, Englewood, Colo.; the Ventolin metered dose inhaler, manufactured by Glaxo Inc., Research Triangle Park, North Carolina; and the Spinhaler powder inhaler, manufactured by Fisons Corp., Bedford, Mass. (See, e.g., Helgesson et al., Inhalation device, U.S. Pat. No. 6,892,728; McDerment et al., Dry powder inhaler, WO 02/11801 A1; Ohki et al., Inhalant medicator, U.S. Pat. No. 6,273,086). All such devices require the use of formulations suitable for the dispensing of the inventive compound. Typically, each formulation is specific to the type of device employed and can involve the use of an appropriate propellant material, in addition to diluents, adjuvants and/or carriers useful in therapy.

[0689] The inventive compound should most advantageously be prepared in particulate form with an average particle size of less than 10 μm (or microns), most preferably 0.5 to 5 μm, for most effective delivery to the distal lung.

[0690] Pharmaceutically acceptable excipients include carbohydrates such as trehalose, mannitol, xylitol, sucrose, lactose, and sorbitol. Other ingredients for use in formulations can include DPPC, DOPE, DSPC and DOPC. Natural or synthetic surfactants can be used. PEG can be used (even apart from its use in derivatizing the protein or analog). Dextrans, such as cyclodextran, can be used. Bile salts and other related enhancers can be used. Cellulose and cellulose derivatives can be used Amino acids can be used, such as use in a buffer formulation.

[0691] Also, the use of liposomes, microcapsules or microspheres, inclusion complexes, or other types of carriers is contemplated.

[0692] Formulations suitable for use with a nebulizer, either jet or ultrasonic, will typically comprise the inventive compound dissolved in water at a concentration of about 0.1 to 25 mg of biologically active protein per mL of solution. The formulation can also include a buffer and a simple sugar (e.g., for protein stabilization and regulation of osmotic pressure). The nebulizer formulation can also contain a surfactant, to reduce or prevent surface induced aggregation of the protein caused by atomization of the solution in forming the aerosol.

[0693] Formulations for use with a metered-dose inhaler device will generally comprise a finely divided powder containing the inventive compound suspended in a propellant with the aid of a surfactant. The propellant can be any conventional material employed for this purpose, such as a chlorofluorocarbon, a hydrochlorofluorocarbon, a hydrofluorocarbon, or a hydrocarbon, including trichlorofluoromethane, dichlorodifluoromethane, dichlorotetrafluoroethanol, and 1,1,1,2-tetrafluoroethane, or combinations thereof. Suitable surfactants include sorbitan trioleate and soya lecithin. Oleic acid can also be useful as a surfactant. (See, e.g., Bäckström et al., Aerosol drug formulations containing hydrofluoroalkanes and alkyl saccharides, U.S. Pat. No. 6,932,962).

[0694] Formulations for dispensing from a powder inhaler device will comprise a finely divided dry powder containing the inventive compound and can also include a bulking agent, such as lactose, sorbitol, sucrose, mannitol, trehalose, or xylitol in amounts which facilitate dispersal of the powder from the device, e.g., 50 to 90% by weight of the formulation.

[0695] Nasal Delivery Forms.

[0696] In accordance with the present invention, intranasal delivery of the inventive composition of matter and/or pharmaceutical compositions is also useful, which allows passage thereof to the blood stream directly after administration to the inside of the nose, without the necessity for deposition of the product in the lung. Formulations suitable for intransal administration include those with dextran or cyclodextran, and intranasal delivery devices are known. (See, e.g, Freezer, Inhaler, U.S. Pat. No. 4,083,368).

[0697] Transdermal and Transmucosal (e.g., Buccal) Delivery Forms).

[0698] In some embodiments, the inventive composition is configured as a part of a pharmaceutically acceptable transdermal or transmucosal patch or a troche. Transdermal patch drug delivery systems, for example, matrix type transdermal patches, are known and useful for practicing some embodiments of the present pharmaceutical compositions. (E.g., Chien et al., Transdermal estrogen/progestin dosage unit, system and process, U.S. Pat. Nos. 4,906,169 and 5,023,084; Cleary et al., Diffusion matrix for transdermal drug administration and transdermal drug delivery devices including same, U.S. Pat. No. 4,911,916; Teillaud et al., EVA-based transdermal matrix system for the administration of an estrogen and/or a progestogen, U.S. Pat. No. 5,605,702; Venkateshwaran et al., Transdermal drug delivery matrix for coadministering estradiol and another steroid, U.S. Pat. No. 5,783,208; Ebert et al., Methods for providing testosterone and optionally estrogen replacement therapy to women, U.S. Pat. No. 5,460,820). A variety of pharmaceutically acceptable systems for transmucosal delivery of therapeutic agents are also known in the art and are compatible with the practice of the present invention. (E.g., Heiber et al., Transmucosal delivery of macromolecular drugs, U.S. Pat. Nos. 5,346,701 and 5,516,523; Longenecker et al., Transmembrane formulations for drug administration, U.S. Pat. No. 4,994,439).

[0699] Buccal delivery of the inventive compositions is also useful. Buccal delivery formulations are known in the art for use with peptides. For example, known tablet or patch systems configured for drug delivery through the oral mucosa (e.g., sublingual mucosa), include some embodiments that comprise an inner layer containing the drug, a permeation enhancer, such as a bile salt or fusidate, and a hydrophilic polymer, such as hydroxypropyl cellulose, hydroxypropyl methylcellulose, hydroxyethyl cellulose, dextran, pectin, polyvinyl pyrrolidone, starch, gelatin, or any number of other polymers known to be useful for this purpose. This inner layer can have one surface adapted to contact and adhere to the moist mucosal tissue of the oral cavity and can have an opposing surface adhering to an overlying non-adhesive inert layer. Optionally, such a transmucosal delivery system can be in the form of a bilayer tablet, in which the inner layer also contains additional binding agents, flavoring agents, or fillers. Some useful systems employ a non-ionic detergent along with a permeation enhancer. Transmucosal delivery devices may be in free form, such as a cream, gel, or ointment, or may comprise a determinate form such as a tablet, patch or troche. For example, delivery of the inventive composition can be via a transmucosal delivery system comprising a laminated composite of, for example, an adhesive layer, a backing layer, a permeable membrane defining a reservoir containing the inventive composition, a peel seal disc underlying the membrane, one or more heat seals, and a removable release liner. (E.g., Ebert et al., Transdermal delivery system with adhesive overlay and peel seal disc, U.S. Pat. No. 5,662,925; Chang et al., Device for administering an active agent to the skin or mucosa, U.S. Pat. Nos. 4,849,224 and 4,983,395). These examples are merely illustrative of available transmucosal drug delivery technology and are not limiting of the present invention.

[0700] Dosages.

[0701] The dosage regimen involved in a method for treating the above-described conditions will be determined by the attending physician, considering various factors which modify the action of drugs, e.g. the age, condition, body weight, sex and diet of the patient, the severity of any infection, time of administration and other clinical factors. Generally, the daily regimen should be in the range of 0.1-1000 micrograms of the inventive compound per kilogram of body weight, preferably 0.1-150 micrograms per kilogram.

[0702] By way of further illustration, the following numbered embodiments are encompassed by the present invention:

[0703] 1. A composition of matter comprising an isolated polypeptide comprising the amino acid sequence of the formula:
[0704] Xₐₐ¹Xₐₐ²Xₐₐ³Xₐₐ⁴Xₐₐ⁵Xₐₐ⁶Xₐₐ⁷Xₐₐ⁸Xₐₐ⁹Xₐₐ¹⁰Xₐₐ¹¹Aspₐₐ¹²Xₐₐ¹³Xₐₐ¹⁴ Xₐₐ¹⁵Xₐₐ¹⁶Xₐₐ¹⁷Xₐₐ¹⁸Xₐₐ¹⁹Xₐₐ²⁰Leuₐₐ²¹Xₐₐ²²Xₐₐ²³Xₐₐ²⁴Xₐₐ²⁵Xₐₐ²⁶Xₐₐ²⁷Xₐₐ²⁸Xₐₐ²⁹Xₐₐ³⁰Xₐₐ³¹Xₐₐ³²Xₐₐ³³Xₐₐ³⁴//SEQ ID NO:590
   or a pharmaceutically acceptable salt thereof,
   wherein:
[0705] Xₐₐ¹Xₐₐ² is absent; or Xₐₐ¹ is any amino acid residue and Xₐₐ² is any amino acid residue; or Xₐₐ¹ is absent and Xₐₐ² is any amino acid residue; or Xₐₐ¹ is absent and Xₐₐ² is absent;
[0706] Xₐₐ³ is any amino acid residue;
[0707] Xₐₐ⁴ is Cys, if Xₐₐ¹⁸ is Cys; or Xₐₐ⁴ is SeCys, if Xₐₐ¹⁸ is SeCys;
[0708] Xₐₐ⁵ is any neutral hydrophilic or basic amino acid residue;
[0709] Xₐₐ⁶ is any basic or neutral hydrophilic amino acid residue;
[0710] Xₐₐ⁷ is a Trp, 5-bromoTrp, 6-bromoTrp, 5-chloroTrp, 6-chloroTrp, 1-Nal, 2-Nal, thioTrp, BhPhe, 2-BrhF, 2-C1hF, 2-FhF, 2-MehF, 2-MeOhF, 3-BrhF, 3-C1hF, 3-FhF, 3-MehF, 3-MeOhF, 4-BrhF, 4-C1hF, 4-FhF, 4-Me-F, 4-MehF, 4-MeOhF residue;
[0711] Xₐₐ⁸ is a Met, Nle, Nva, Leu, Ile, Val, or Phe residue;
[0712] Xₐₐ⁹ is a Trp, 5-bromoTrp, 6-bromoTrp, 5-chloroTrp, 6-chloroTrp, 1-Nal, 2-Nal, or thioTrp residue;
[0713] Xₐₐ¹⁰ is a basic or neutral hydrophilic amino acid residue, or an Ala residue;
[0714] Xₐₐ¹¹ is Cys if Xaa²³ is Cys; or Xₐₐ¹¹ is SeCys if Xₐₐ²³ is SeCys;
[0715] Xₐₐ¹³ is any amino acid residue;
[0716] Xₐₐ¹⁴ is a basic or acidic residue or an Ala residue;
[0717] Xₐₐ¹⁵ is an Arg or Cit residue;
[0718] Xₐₐ¹⁶ is any amino acid residue;
[0719] Xₐₐ¹⁷ is a Cys if Xₐₐ²⁷ is Cys; or Xₐₐ¹⁷ is a SeCys if Xₐₐ²⁷ is SeCys;
[0720] Xₐₐ¹⁸ is a Cys or SeCys;
[0721] Xₐₐ¹⁹ is any amino acid residue;
[0722] Xₐₐ²⁰ is a Gly, Asp or Ala residue;
[0723] Xₐₐ²² is an acidic, basic, or neutral hydrophilic amino acid residue, or Ala or Val residue;
[0724] Xₐₐ²³ is a Cys or SeCys residue;
[0725] Xₐₐ²⁴ is a basic or neutral hydrophilic amino acid or Ala residue;
[0726] Xₐₐ²⁵ is an aliphatic hydrophobic residue;
[0727] Xₐₐ²⁶ is a Trp, 5-bromoTrp, 6-bromoTrp, 5-chloroTrp, 6-chloroTrp, 7-BrW, 1-Nal, 2-Nal, thioTrp, 5-phenylTrp, 5-iPrTrp, 5-ethylTrp, or 5-MeTrp residue;
[0728] Xₐₐ²⁷ is a Cys or SeCys residue;
[0729] Xₐₐ²⁸ is a basic or neutral hydrophilic amino acid residue;
[0730] Xₐₐ²⁹ is a basic amino acid residue, or a Tyr or Leu residue;
[0731] Xₐₐ³⁰ is an Ile, Trp, Tyr, 5-bromoTrp, 6-bromoTrp, 5-chloroTrp, 6-chloroTrp, thioTrp, 1-Nal, or 2-Nal residue, if Xₐₐ²² is an acidic amino acid residue; or Xₐₐ³⁰ is an acidic amino acid residue or a Pro residue, if Xₐₐ²² is a basic or neutral hydrophilic amino acid residue or an Ala or Val residue;
[0732] Xₐₐ³¹ is an Ile, Trp, Phe, BhPhe, Cha, Tyr, 5-bromoTrp, 6-bromoTrp, 5-chloroTrp, 6-chloroTrp, 1-Nal, 2-Nal, thioTrp, or 4-tBu-F residue;
[0733] each of Xₐₐ³², Xₐₐ³³, and Xₐₐ³⁴ is independently absent or is independently a hydrophobic or acidic amino acid residue, or a Ser or Gly residue;
[0734] and wherein:

[0735] if Xₐₐ⁴ and Xₐₐ¹⁸ are both Cys residues, there is a disulfide bond between residue Xₐₐ⁴ and residue Xₐₐ¹⁸; or if Xₐₐ⁴ and Xₐₐ¹⁸ are both SeCys residues, there is a diselenide bond between residue Xₐₐ⁴ and residue Xₐₐ¹⁸;

[0736] if Xₐₐ¹¹ and Xₐₐ²³ are both Cys residues, there is a disulfide bond between residue Xₐₐ¹¹ and residue Xₐₐ²³; or if Xₐₐ¹¹ and Xₐₐ²³ are both SeCys residues, there is a diselenide bond between residue Xₐₐ¹¹ and residue Xₐₐ²³;

[0737] if Xₐₐ¹⁷ and Xₐₐ²⁷ are both Cys residues, there is a disulfide bond between residue Xₐₐ¹⁷ and residue Xₐₐ²⁷; or if Xₐₐ¹⁷ and Xₐₐ²⁷ are both SeCys residues, there is a diselenide bond between residue Xₐₐ¹⁷ and residue Xₐₐ²⁷;

[0738] the amino-terminal residue is optionally acetylated, biotinylated, or 4-pentynoylated, or PEGylated; and

[0739] the carboxy-terminal residue is optionally amidated.

[0740] 2. The composition of matter of Embodiment 1, wherein one or more of Xₐₐ¹⁴, Xₐₐ¹⁶, or Xₐₐ²² is an acidic amino acid residue.

[0741] 3. The composition of matter of Embodiment 2, wherein the acidic amino acid residue is selected from Glu, Asp, phosphoserine, phosphotyrosine, and gamma-carboxyglutamic acid residues.

[0742] 4. The composition of matter of Embodiments 1-3, wherein Xₐₐ¹⁴, Xₐₐ¹⁶, or Xₐₐ²² is a Glu residue.

[0743] 5. The composition of matter of any of Embodiments 2-4, wherein Xₐₐ³⁰ is an Ile, Trp, or Tyr residue.

[0744] 6. The composition of matter of Embodiment 1, wherein Xₐₐ²² is a basic or neutral hydrophilic amino acid residue or an Ala or Val residue.

[0745] 7. The composition of matter of Embodiment 6, wherein Xₐₐ²² is selected from histidine, lysine, homolysine, ornithine, arginine, N-methyl-arginine, ω-aminoarginine, ω-methyl-arginine, 1-methyl-histidine, 3-methyl-histidine, homoarginine, Ala, Cit, or Val residues, and Xₐₐ³⁰ is selected from Glu, Asp, phosphoserine, phosphotyrosine, and gamma-carboxyglutamic acid residues.

[0746] 8. The composition of matter of Embodiment 1, wherein Xₐₐ²² is an Arg residue, a Cit residue, a Val residue, or Ala residue, and Xₐₐ³⁰ is a Glu residue.

[0747] 9. The composition of matter of any of Embodiment 6 or Embodiment 7, wherein Xₐₐ³⁰ is selected from Glu, Asp, phosphoserine, phosphotyrosine, and gamma-carboxyglutamic acid residues.

[0748] 10. The composition of matter of Embodiment 9, wherein Xₐₐ³⁰ is a Glu residue.

[0749] 11. The composition of matter of Embodiments 1-10, wherein Xₐₐ²⁸ is a Cit residue.

[0750] 12. The composition of matter of Embodiments 1-11, wherein Xₐₐ³¹ is an Ile, Trp, Cha, Phe, BhPhe, or Tyr residue.

[0751] 13. The composition of matter of Embodiments 1-12, wherein Xₐₐ¹ is a Pra, Aha, Abu, Nva, Nle, Sar, hLeu, hPhe, D-Leu, D-Phe, D-Ala, bAla, AllylG, CyA, or Atz residue.

[0752] 14. The composition of matter of Embodiments 1-13, wherein Xₐₐ¹ is absent; or Xₐₐ¹ is any amino acid residue; and

Xₐₐ² is any hydrophobic or acidic amino acid residue, or a Pra, hPra, bhPra, ethynylphenylalanine (EPA), (S)-2-amino-4-hexynoic acid, Aha, Abu, Nva, Nle, Sar, hLeu, hPhe, D-Leu, D-Phe, D-Ala, bAla, AllylG, CyA, or Atz residue.

[0753] 15. The composition of matter of Embodiment 14, wherein Xₐₐ²⁰ is a Gly or Ala residue.

[0754] 16. The composition of matter of Embodiments 14-15, wherein Xₐₐ⁶ is a basic amino acid residue.

[0755] 17. The composition of matter of Embodiments 14-16, wherein Xₐₐ² is a Pra, hPra, bhPra, EPA, Aha, (S)-2-amino-4-hexynoic acid, Abu, Nva, Nle, Sar, hLeu, hPhe, D-Leu, D-Phe, D-Ala, bAla, AllylG, CyA, Atz, Ala, Phe, Ile, Leu, Met, Val, Trp, Tyr, proline, thiaproline, methionine, glycine, 1-Nal, 2-Nal, 1′NMe-Trp, cyclopentylglycine (Cpg), phenylglycine, N-methylleucine, N-methylphenylalanine, N-methylvaline, cyclohexylglycine (Chg), cyclohexylalanine (Cha), 2-chloro-phenylalanine, 4-chloro-phenylalanine, 3,4-dichlorophenylalanine, 4-trifluoromethyl-phenylalanine, or 4-phenyl-phenylalanine (Bip) residue.

[0756] 18. The composition of matter of Embodiments 14-16, wherein Xₐₐ² is an acidic amino acid residue.

[0757] 19. The composition of matter of Embodiments 14-18, wherein Xₐₐ³⁰ is an acidic amino acid residue.

[0758] 20. The composition of matter of Embodiments 14-18, wherein Xₐₐ³⁰ is an Ile, Trp, Tyr, 5-bromoTrp, 6-bromoTrp, 5-chloroTrp, 6-chloroTrp, 1-Nal, 2-Nal, thioTrp, 1-Nal, or 2-Nal residue.

[0759] 21. The composition of matter of Embodiments 14-20, wherein Xₐₐ³ is an acidic amino acid residue.

[0760] 22. The composition of matter of Embodiments 14-20, wherein Xₐₐ¹³ is an acidic amino acid residue.

[0761] 23. The composition of matter of Embodiments 14-20, wherein Xₐₐ¹⁴ is an acidic amino acid residue.

[0762] 24. The composition of matter of Embodiments 14-20, wherein Xₐₐ¹⁵ is a Cit residue.

[0763] 25. The composition of matter of Embodiments 14-20, wherein Xₐₐ¹⁶ is an acidic amino acid residue.

[0764] 26. The composition of matter of Embodiments 14-20, wherein Xₐₐ¹⁹ is an acidic amino acid residue.

[0765] 27. The composition of matter of Embodiments 14-20, wherein Xₐₐ²² is a neutral hydrophilic amino acid residue, a Val residue, or an Ala residue.

[0766] 28. The composition of matter of Embodiments 14-20, wherein Xₐₐ²⁴ is a neutral hydrophilic amino acid residue.

[0767] 29. The composition of matter of Embodiments 14-20, wherein Xₐₐ²⁸ is a neutral hydrophilic amino acid residue.

[0768] 30. The composition of matter of any of Embodiments 14-29, wherein Xₐₐ³⁰ is an Ile, Trp, or Tyr residue.

[0769] 31. The composition of matter of Embodiments 1-30, wherein Xₐₐ⁸ is an Nle or Leu residue.

[0770] 32. The composition of matter of Embodiments 1-31, wherein the carboxy-terminal residue is amidated.

[0771] 33. The composition of matter of Embodiment 1, comprising an amino acid sequence selected from SEQ ID NO:63, SEQ ID NO:69, SEQ ID NO:110, SEQ ID NO:111, SEQ ID NO:112, SEQ ID NO:113, SEQ ID NO:114, SEQ ID NO:115, SEQ ID NO:131, SEQ ID NO:137, SEQ ID NO:139, SEQ ID NO:140, SEQ ID NO:141, SEQ ID NO:142, SEQ ID NO:143, SEQ ID NO:144, SEQ ID NO:145, SEQ ID NO:146, SEQ ID NO:147, SEQ ID NO:149, SEQ ID NO:150, SEQ ID NO:152, SEQ ID NO:153, SEQ ID NO:154, SEQ ID NO:157, SEQ ID NO:159, SEQ ID NO:160, SEQ ID NO:161, SEQ ID NO:162, SEQ ID NO:163, SEQ ID NO:164, SEQ ID NO:165, SEQ ID NO:166, SEQ ID NO:167, SEQ ID NO:168, SEQ ID NO:169, SEQ ID NO:170, SEQ ID NO:171, SEQ ID NO:172, SEQ ID NO:174, SEQ ID NO:175, SEQ ID NO:177, SEQ ID NO:178, SEQ ID NO:179, SEQ ID NO:182, SEQ ID NO:184, SEQ ID NO:185, SEQ ID NO:186, SEQ ID NO:187, SEQ ID NO:188, SEQ ID NO:189, SEQ ID NO:190, SEQ ID NO:191, SEQ ID NO:192, SEQ ID NO:193, SEQ ID NO:194, SEQ ID NO:195, SEQ ID NO:196, SEQ ID NO:197, SEQ ID NO:198, SEQ ID NO:199, SEQ ID NO:200, SEQ ID NO:201, SEQ ID NO:202, SEQ ID NO:203, SEQ ID NO:204, SEQ ID NO:205, SEQ ID NO:206, SEQ ID NO:207, SEQ ID NO:208, SEQ ID NO:209, SEQ ID NO:210, SEQ ID NO:211, SEQ ID NO:212, SEQ ID NO:213, SEQ ID NO:214, SEQ ID NO:215, SEQ ID NO:216, SEQ ID NO:217, SEQ ID NO:218, SEQ ID NO:219, SEQ ID NO:220, SEQ ID NO:221, SEQ ID NO:222, SEQ ID NO:223, SEQ ID NO:224, SEQ ID NO:225, SEQ ID NO:226, SEQ ID NO:227, SEQ ID NO:228, SEQ ID NO:229, SEQ ID NO:230, SEQ ID NO:231, SEQ ID NO:232, SEQ ID NO:233, SEQ ID NO:234, SEQ ID NO:235, SEQ ID NO:236, SEQ ID NO:237, SEQ ID NO:238, SEQ ID NO:239, SEQ ID NO:240, SEQ ID NO:241, SEQ ID NO:242, SEQ ID NO:243, SEQ ID NO:244, SEQ ID NO:245, SEQ ID NO:246, SEQ ID NO:273, SEQ ID NO:274, SEQ ID NO:277, SEQ ID NO:279, SEQ ID NO:284, SEQ ID NO:285, SEQ ID NO:286, SEQ ID NO:287, SEQ ID NO:288, SEQ ID NO:289, SEQ ID NO:290, SEQ ID NO:291, SEQ ID NO:292, SEQ ID NO:293, SEQ ID NO:294, SEQ ID NO:295, SEQ ID NO:297, SEQ ID NO:298, SEQ ID NO:299, SEQ ID NO:300, SEQ ID NO:301, SEQ ID NO:302, SEQ ID NO:303, SEQ ID NO:304, SEQ ID NO:305, SEQ ID NO:306, SEQ ID NO:307, SEQ ID NO:308, SEQ ID NO:309, SEQ ID NO:310, SEQ ID NO:311, SEQ ID NO:312, SEQ ID NO:313, SEQ ID NO:314, SEQ ID NO:315, SEQ ID NO:316, SEQ ID NO:317, SEQ ID NO:318, SEQ ID NO:319, SEQ ID NO:320, SEQ ID NO:321, SEQ ID NO:322, SEQ ID NO:323, SEQ ID NO:324, SEQ ID NO:325, SEQ ID NO:326, SEQ ID NO:327, SEQ ID NO:328, SEQ ID NO:329, SEQ ID NO:330, SEQ ID NO:331, SEQ ID NO:332, SEQ ID NO:333, SEQ ID NO:334, SEQ ID NO:335, SEQ ID NO:336, SEQ ID NO:337, SEQ ID NO:338, SEQ ID NO:339, SEQ ID NO:340, SEQ ID NO:341, SEQ ID NO:342, SEQ ID NO:343, SEQ ID NO:344, SEQ ID NO:345, SEQ ID NO:346, SEQ ID NO:347, SEQ ID NO:348, SEQ ID NO:349, SEQ ID NO:350, SEQ ID NO:351, SEQ ID NO:352, SEQ ID NO:353, SEQ ID NO:354, SEQ ID NO:355, SEQ ID NO:356, SEQ ID NO:392, SEQ ID NO:393, SEQ ID NO:394, SEQ ID NO:395, SEQ ID NO:396, SEQ ID NO:397, SEQ ID NO:406, SEQ ID NO:407, SEQ ID NO:408, SEQ ID NO:409, SEQ ID NO:411, SEQ ID NO:412, SEQ ID NO:413, SEQ ID NO:414, SEQ ID NO:415, SEQ ID NO:416, SEQ ID NO:417, SEQ ID NO:418, SEQ ID NO:419, SEQ ID NO:420, SEQ ID NO:421, SEQ ID NO:422, SEQ ID NO:426, SEQ ID NO:435, SEQ ID NO:436, SEQ ID NO:437, SEQ ID NO:439, SEQ ID NO:440, SEQ ID NO:441, SEQ ID NO:442, SEQ ID NO:443, SEQ ID NO:444, SEQ ID NO:445, SEQ ID NO:447, SEQ ID NO:448, SEQ ID NO:449, SEQ ID NO:450, SEQ ID NO:451, SEQ ID NO:452, SEQ ID NO:455, SEQ ID NO:456, SEQ ID NO:457, SEQ ID NO:458, SEQ ID NO:459, SEQ ID NO:460, SEQ ID NO:461, SEQ ID NO:462, SEQ ID NO:463, SEQ ID NO:464, SEQ ID NO:465, SEQ ID NO:466, SEQ ID NO:467, SEQ ID NO:468, SEQ ID NO:469, SEQ ID NO:470, SEQ ID NO:471, SEQ ID NO:472, SEQ ID NO:473, SEQ ID NO:474, SEQ ID NO:475, SEQ ID NO:518, SEQ ID NO:520, SEQ ID NO:521, SEQ ID NO:523, SEQ ID NO:524, SEQ ID NO:526, SEQ ID NO:527, SEQ ID NO:546, SEQ ID NO:547, SEQ ID NO:548, SEQ ID NO:549, SEQ ID NO:550, SEQ ID NO:551, SEQ ID NO:552, SEQ ID NO:553, SEQ ID NO:554, SEQ ID NO:555, SEQ ID NO:556, SEQ ID NO:557, SEQ ID NO:558, SEQ ID NO:559, SEQ ID NO:560, SEQ ID NO:561, SEQ ID NO:562, SEQ ID NO:563, SEQ ID NO:565, SEQ ID NO:566, SEQ ID NO:568, SEQ ID NO:573, SEQ ID NO:574, SEQ ID NO:576, SEQ ID NO:577, SEQ ID NOS: 578-588, SEQ ID NO:597, SEQ ID NO:605, SEQ ID NO:614, SEQ ID NO:615, SEQ ID NO:635, SEQ ID NO:636, SEQ ID NO:640, SEQ ID NO:641, SEQ ID NO:642, SEQ ID NO:643, SEQ ID NO:644, SEQ ID NO:645, SEQ ID NO:657, SEQ ID NO:667, SEQ ID NO:687, SEQ ID NO:688, SEQ ID NOS: 692-697, SEQ ID NO:701, SEQ ID NO:702, SEQ ID NO:707, SEQ ID NO:708, SEQ ID NO:709, SEQ ID NOS: 714-718, SEQ ID NO:721, SEQ ID NO:723, SEQ ID NOS: 726-729, SEQ ID NOS: 731-757, SEQ ID NOS: 764-785, SEQ ID NO:789, SEQ ID NO:790, SEQ ID NO:791, SEQ ID NOS: 795-801, SEQ ID NO:803, SEQ ID NO:804, SEQ ID NO:805, SEQ ID NO:807, SEQ ID NO:808, SEQ ID NO:809, SEQ ID NO:814, SEQ ID NOS: 816-824, SEQ ID NO:828, SEQ ID NO:829, SEQ ID NO:831, SEQ ID NO:833, SEQ ID NOS: 835-870, SEQ ID NOS: 873-885, SEQ ID NOS: 888-909, SEQ ID NO:911, SEQ ID NO:912, SEQ ID NO:913, SEQ ID NO:923, SEQ ID NO:924, SEQ ID NO:925, SEQ ID NO:929, SEQ ID NO:930, SEQ ID NO:931, SEQ ID NOS: 941-984, SEQ ID NOS: 986-1033, SEQ ID NOS: 1136-1188, SEQ ID NOS: 1190-1242, SEQ ID NO:1350, SEQ ID NO:1351, SEQ ID NO:1352, SEQ ID NO:1353, SEQ ID NOS: 1358-1369, SEQ ID NOS: 1382-1393, SEQ ID NOS: 1406-1417, SEQ ID NO:1430, SEQ ID NOS: 1432-1443, SEQ ID NOS: 1456-1467, SEQ ID NOS: 1480-1491, SEQ ID NOS: 1510-1515, SEQ ID NOS: 1522-1527, SEQ ID NOS: 1534-1611, SEQ ID NO:1613, SEQ ID NOS: 1615-1640, SEQ ID NO:1644, SEQ ID NO:1645, and SEQ ID NOS: 1649-1694.

[0772] 34. The composition of matter of Embodiment 1, comprising an amino acid sequence selected from SEQ ID NO:715, SEQ ID NO:728, SEQ ID NO:732, SEQ ID NO:735, SEQ ID NO:737, SEQ ID NO:742, SEQ ID NO:744, SEQ ID NO:746, SEQ ID NO:747, SEQ ID NO:748, SEQ ID NO:749, SEQ ID NO:753, SEQ ID NO:754, SEQ ID NO:755, SEQ ID NO:756, SEQ ID NO:757, SEQ ID NO:835, SEQ ID NO:836, SEQ ID NO:837, SEQ ID NO:953, SEQ ID NO:954, SEQ ID NO:955, SEQ ID NO:956, SEQ ID NO:957, SEQ ID NO:969, SEQ ID NO:970, SEQ ID NO:971, SEQ ID NO:972, SEQ ID NO:973, SEQ ID NO:974, SEQ ID NO:975, SEQ ID NO:976, SEQ ID NO:977, SEQ ID NO:978, SEQ ID NO:979, SEQ ID NO:980, SEQ ID NO:981, SEQ ID NO:982, SEQ ID NO:983, SEQ ID NO:984, SEQ ID NO:1002, SEQ ID NO:1003, SEQ ID NO:1004, SEQ ID NO:1005, SEQ ID NO:1006, SEQ ID NO:1018, SEQ ID NO:1019, SEQ ID NO:1020, SEQ ID NO:1021, SEQ ID NO:1022, SEQ ID NO:1023, SEQ ID NO:1024, SEQ ID NO:1025, SEQ ID NO:1026, SEQ ID NO:1027, SEQ ID NO:1028, SEQ ID NO:1029, SEQ ID NO:1030, SEQ ID NO:1031, SEQ ID NO:1032, SEQ ID NO:1137, SEQ ID NO:1157, SEQ ID NO:1158, SEQ ID NO:1159, SEQ ID NO:1160, SEQ ID NO:1161, SEQ ID NO:1173, SEQ ID NO:1174, SEQ ID NO:1175, SEQ ID NO:1176, SEQ ID NO:1177, SEQ ID NO:1178, SEQ ID NO:1179, SEQ ID NO:1180, SEQ ID NO:1181, SEQ ID NO:1182, SEQ ID NO:1183, SEQ ID NO:1184, SEQ ID NO:1185, SEQ ID NO:1186, SEQ ID NO:1187, SEQ ID NO:1188, SEQ ID NO:1191, SEQ ID NO:1211, SEQ ID NO:1212, SEQ ID NO:1213, SEQ ID NO:1214, SEQ ID NO:1225, SEQ ID NO:1227, SEQ ID NO:1228, SEQ ID NO:1229, SEQ ID NO:1230, SEQ ID NO:1231, SEQ ID NO:1232, SEQ ID NO:1233, SEQ ID NO:1234, SEQ ID NO:1235, SEQ ID NO:1236, SEQ ID NO:1237, SEQ ID NO:1238, SEQ ID NO:1239, SEQ ID NO:1240, SEQ ID NO:1241, SEQ ID NO:1242, SEQ ID NO:1351, SEQ ID NO:1353, SEQ ID NO:1360, SEQ ID NO:1362, SEQ ID NO:1363, SEQ ID NO:1366, SEQ ID NO:1368, SEQ ID NO:1369, SEQ ID NO:1384, SEQ ID NO:1386, SEQ ID NO:1387, SEQ ID NO:1390, SEQ ID NO:1392, SEQ ID NO:1393, SEQ ID NO:1408, SEQ ID NO:1410, SEQ ID NO:1411, SEQ ID NO:1414, SEQ ID NO:1416, SEQ ID NO:1417, SEQ ID NO:1434, SEQ ID NO:1436, SEQ ID NO:1437, SEQ ID NO:1440, SEQ ID NO:1442, SEQ ID NO:1443, SEQ ID NO:1458, SEQ ID NO:1460, SEQ ID NO:1461, SEQ ID NO:1464, SEQ ID NO:1466, SEQ ID NO:1467, SEQ ID NO:1482, SEQ ID NO:1484, SEQ ID NO:1485, SEQ ID NO:1488, SEQ ID NO:1490, SEQ ID NO:1491, SEQ ID NO:1628, SEQ ID NO:1629, SEQ ID NO:1673, SEQ ID NO:1674, SEQ ID NO:1677, SEQ ID NO:1678, SEQ ID NO:1683, SEQ ID NO:1686, and SEQ ID NO:1687.

[0773] 35. The composition of matter of Embodiment 1, comprising an amino acid sequence selected from SEQ ID NO:717, SEQ ID NO:733, SEQ ID NO:738, SEQ ID NO:740, SEQ ID NO:743, SEQ ID NO:745, SEQ ID NO:747, SEQ ID NO:749, SEQ ID NO:750, SEQ ID NO:751, SEQ ID NO:752, SEQ ID NO:753, SEQ ID NO:755, SEQ ID NO:756, SEQ ID NO:757, SEQ ID NO:770, SEQ ID NO:771, SEQ ID NO:773, SEQ ID NO:958, SEQ ID NO:959, SEQ ID NO:960, SEQ ID NO:961, SEQ ID NO:962, SEQ ID NO:963, SEQ ID NO:1138, SEQ ID NO:1162, SEQ ID NO:1163, SEQ ID NO:1164, SEQ ID NO:1165, SEQ ID NO:1166, SEQ ID NO:1167, SEQ ID NO:1192, SEQ ID NO:1361, SEQ ID NO:1367, SEQ ID NO:1385, SEQ ID NO:1391, SEQ ID NO:1409, SEQ ID NO:1415, SEQ ID NO:1430, SEQ ID NO:1435, SEQ ID NO:1441, SEQ ID NO:1459, SEQ ID NO:1465, SEQ ID NO:1483, SEQ ID NO:1489, SEQ ID NO:1596, SEQ ID NO:1597, SEQ ID NO:1598, SEQ ID NO:1600, SEQ ID NO:1602, SEQ ID NO:1645, and SEQ ID NO:1694.

[0774] 36. The composition of matter of Embodiment 1, comprising an amino acid sequence selected from SEQ ID NO:1137, SEQ ID NO:1157, SEQ ID NO:1158, SEQ ID NO:1159, SEQ ID NO:1160, SEQ ID NO:1161, SEQ ID NO:1173, SEQ ID NO:1174, SEQ ID NO:1175, SEQ ID NO:1176, SEQ ID NO:1177, SEQ ID NO:1178, SEQ ID NO:1179, SEQ ID NO:1180, SEQ ID NO:1181, SEQ ID NO:1182, SEQ ID NO:1183, SEQ ID NO:1184, SEQ ID NO:1185, SEQ ID NO:1186, SEQ ID NO:1187, SEQ ID NO:1188, SEQ ID NO:1191, SEQ ID NO:1211, SEQ ID NO:1212, SEQ ID NO:1213, SEQ ID NO:1214, SEQ ID NO:1215, SEQ ID NO:1227, SEQ ID NO:1228, SEQ ID NO:1229, SEQ ID NO:1230, SEQ ID NO:1231, SEQ ID NO:1232, SEQ ID NO:1233, SEQ ID NO:1234, SEQ ID NO:1235, SEQ ID NO:1236, SEQ ID NO:1237, SEQ ID NO:1238, SEQ ID NO:1239, SEQ ID NO:1240, SEQ ID NO:1241, SEQ ID NO:1242, SEQ ID NO:1351, SEQ ID NO:1353, SEQ ID NO:1360, SEQ ID NO:1362, SEQ ID NO:1363, SEQ ID NO:1366, SEQ ID NO:1368, SEQ ID NO:1369, SEQ ID NO:1384, SEQ ID NO:1386, SEQ ID NO:1387, SEQ ID NO:1390, SEQ ID NO:1392, SEQ ID NO:1393, SEQ ID NO:1408, SEQ ID NO:1410, SEQ ID NO:1411, SEQ ID NO:1414, SEQ ID NO:1416, SEQ ID NO:1417, SEQ ID NO:1434, SEQ ID NO:1436, SEQ ID NO:1437, SEQ ID NO:1440, SEQ ID NO:1442, SEQ ID NO:1443, SEQ ID NO:1458, SEQ ID NO:1460, SEQ ID NO:1461, SEQ ID NO:1464, SEQ ID NO:1466, SEQ ID NO:1467, SEQ ID NO:1482, SEQ ID NO:1484, SEQ ID NO:1485, SEQ ID NO:1488, SEQ ID NO:1490, SEQ ID NO:1491, and SEQ ID NO:1629.

[0775] 37. The composition of matter of Embodiment 1, comprising an amino acid sequence selected from SEQ ID NO:1138, SEQ ID NO:1162, SEQ ID NO:1163, SEQ ID NO:1164, SEQ ID NO:1165, SEQ ID NO:1166, SEQ ID NO:1167, SEQ ID NO:1192, SEQ ID NO:1361, SEQ ID NO:1367, SEQ ID NO:1385, SEQ ID NO:1391, SEQ ID NO:1409, SEQ ID NO:1415, SEQ ID NO:1430, SEQ ID NO:1435, SEQ ID NO:1441, SEQ ID NO:1459, SEQ ID NO:1465, SEQ ID NO:1483, and SEQ ID NO:1489.

[0776] 38. The composition of matter of Embodiment 1, comprising an isolated polypeptide comprising the amino acid sequence of the formula:
[0777] Xₐₐ¹Xₐₐ²Xₐₐ³Xₐₐ⁴Xₐₐ⁵Xₐₐ⁶Xₐₐ⁷Xₐₐ⁸Xₐₐ⁹Xₐₐ¹⁰Xₐₐ¹¹Aspₐₐ¹²Xₐₐ¹³Xₐₐ¹⁴ Argₐₐ¹⁵Xₐₐ¹⁶Xₐₐ¹⁷Xₐₐ¹⁸Xₐₐ¹⁹Xₐₐ²⁰Leuₐₐ²¹Xₐₐ²²Xₐₐ²³Xₐₐ²⁴Leuₐₐ²⁵Xₐₐ²⁶Xₐₐ²⁷Xₐₐ²⁸Xₐₐ²⁹Xₐₐ³⁰Xₐₐ³¹Xₐₐ³²Xₐₐ³³Xₐₐ³⁴//SEQ ID NO:516
   or a pharmaceutically acceptable salt thereof,
   wherein:
[0778] Xₐₐ¹Xₐₐ² is absent; or Xₐₐ¹ is any amino acid residue and Xₐₐ² is any amino acid residue; or Xₐₐ¹ is absent and Xₐₐ² is any amino acid residue; or Xₐₐ¹ is absent and Xₐₐ² is absent;
[0779] Xₐₐ³ is any amino acid residue;
[0780] Xₐₐ⁴ is Cys, if Xₐₐ¹⁸ is Cys; or Xₐₐ⁴ is SeCys, if Xₐₐ¹⁸ is SeCys;
[0781] Xₐₐ⁵ is any neutral hydrophilic or basic amino acid residue;
[0782] Xₐₐ⁶ is any basic amino acid residue;
[0783] Xₐₐ⁷ is a Trp, 5-bromoTrp, 6-bromoTrp, 5-chloroTrp, 6-chloroTrp, 1-Nal, 2-Nal, or thioTrp residue;
[0784] Xₐₐ⁸ is a Met, Nle, Nva, Leu, Ile, Val, or Phe residue;
[0785] Xₐₐ⁹ is a Trp, 5-bromoTrp, 6-bromoTrp, 5-chloroTrp, 6-chloroTrp, 1-Nal, 2-Nal, or thioTrp residue;
[0786] Xₐₐ¹⁰ is a basic or neutral hydrophilic amino acid residue, or an Ala residue;
[0787] Xₐₐ¹¹ is Cys if Xₐₐ²³ is Cys; or Xₐₐ¹¹ is SeCys if Xₐₐ²³ is SeCys;
[0788] Xₐₐ¹³ is any amino acid residue except a hydrophobic residue;
[0789] Xₐₐ¹⁴ is a basic residue or an Ala residue;
[0790] Xₐₐ¹⁶ is any amino acid residue;
[0791] Xₐₐ¹⁷ is a Cys if Xₐₐ²⁷ is Cys; or Xₐₐ¹⁷ is a SeCys if Xₐₐ²⁷ is SeCys;
[0792] Xₐₐ¹⁸ is a Cys or SeCys;
[0793] Xₐₐ¹⁹ is any amino acid residue;
[0794] Xₐₐ²⁰ is a Gly or Ala residue;
[0795] Xₐₐ²² is an acidic, basic amino acid residue, or Ala residue;
[0796] Xₐₐ²³ is a Cys or SeCys residue;
[0797] Xₐₐ²⁴ is a basic amino acid or Ala residue;
[0798] Xₐₐ²⁶ is a Trp, 5-bromoTrp, 6-bromoTrp, 5-chloroTrp, 6-chloroTrp, 1-Nal, 2-Nal, or thioTrp residue;
[0799] Xₐₐ²⁷ is a Cys or SeCys residue;
[0800] Xₐₐ²⁸ is a basic amino acid residue;
[0801] Xₐₐ²⁹ is a basic amino acid residue;
[0802] Xₐₐ³⁰ is an Ile, Trp, Tyr, 5-bromoTrp, 6-bromoTrp, 5-chloroTrp, 6-chloroTrp, 1-Nal, 2-Nal, thioTrp, 1-Nal, or 2-Nal residue, if Xₐₐ²² is an acidic amino acid residue; or
[0803] Xₐₐ³⁰ is an acidic amino acid residue, if Xₐₐ²² is a basic amino acid residue or an Ala residue;
[0804] Xₐₐ³¹ is an Ile, Trp, Tyr, 5-bromoTrp, 6-bromoTrp, 5-chloroTrp, 6-chloroTrp, 1-Nal, 2-Nal, thioTrp, 1-Nal, or 2-Nal residue;
[0805] each of Xₐₐ³², Xₐₐ³³, and Xₐₐ³⁴ is independently absent or is independently a hydrophobic amino acid residue;
[0806] and wherein:

[0807] if Xₐₐ⁴ and Xₐₐ¹⁸ are both Cys residues, there is a disulfide bond between residue Xₐₐ⁴ and residue Xₐₐ¹⁸; or if Xₐₐ⁴ and Xₐₐ¹⁸ are both SeCys residues, there is a diselenide bond between residue Xₐₐ⁴ and residue Xₐₐ¹⁸;

[0808] if Xₐₐ¹¹ and Xₐₐ²³ are both Cys residues, there is a disulfide bond between residue Xₐₐ¹¹ and residue Xₐₐ²³; or if Xₐₐ¹¹ and Xₐₐ²³ are both SeCys residues, there is a diselenide bond between residue Xₐₐ¹¹ and residue Xₐₐ²³;

[0809] if Xₐₐ¹⁷ and Xₐₐ²⁷ are both Cys residues, there is a disulfide bond between residue Xₐₐ¹⁷ and residue Xₐₐ²⁷; or if Xₐₐ¹⁷ and Xₐₐ²⁷ are both SeCys residues, there is a diselenide bond between residue Xₐₐ¹⁷ and residue Xₐₐ²⁷;

[0810] the amino-terminal residue is optionally acetylated, biotinylated, or 4-pentynoylated, or PEGylated; and

[0811] the carboxy-terminal residue is optionally amidated.

[0812] 39. The composition of matter of Embodiment 38, wherein Xₐₐ²² is an acidic amino acid residue.

[0813] 40. The composition of matter of Embodiment 38, wherein Xₐₐ²² is a basic amino acid residue or an Ala residue; and Xₐₐ³⁰ is selected from Glu, Asp, phosphoserine, phosphotyrosine, and gamma-carboxyglutamic acid residues.

[0814] 41. The composition of matter of Embodiment 40, wherein Xₐₐ³⁰ is a Glu residue.

[0815] 42. The composition of matter of Embodiments 38-41, wherein the carboxy-terminal residue is amidated.

[0816] 43. The composition of matter of Embodiment 1, wherein the composition of matter comprises an isolated polypeptide comprising the amino acid sequence of the formula:
[0817] Xₐₐ¹Xₐₐ²Xₐₐ³Xₐₐ⁴Xₐₐ⁵Xₐₐ⁶Xₐₐ⁷Xₐₐ⁸Xₐₐ⁹Xₐₐ¹⁰Xₐₐ¹¹Aspₐₐ¹²Xₐₐ¹³Xₐₐ¹⁴Argₐₐ¹⁵Xₐₐ¹⁶Xₐₐ¹⁷Xₐₐ¹⁸Xₐₐ¹⁹Xₐₐ²⁰Leuₐₐ²¹Xₐₐ²²Xₐₐ²³Xₐₐ²⁴Leuₐₐ²⁵Xₐₐ²⁶Xₐₐ²⁷Xₐₐ²⁸Xₐₐ²⁹Xₐₐ³⁰Xₐₐ³¹Xₐₐ³²Xₐₐ³³Xₐₐ³⁴//SEQ ID NO:517
   or a pharmaceutically acceptable salt thereof,
   wherein:
[0818] Xₐₐ¹ is absent; or Xₐₐ¹ is any amino acid residue;
[0819] Xₐₐ² is any hydrophobic amino acid residue, or a Pra, Aha, Abu, Nva, Nle, Sar, hLeu, hPhe, D-Leu, D-Phe, D-Ala, bAla, AllylG, CyA, or Atz residue;
[0820] Xₐₐ³ is any amino acid residue;
[0821] Xₐₐ⁴ is Cys, if Xₐₐ¹⁸ is Cys; or Xₐₐ⁴ is SeCys, if Xₐₐ¹⁸ is SeCys;
[0822] Xₐₐ⁵ is any neutral hydrophilic or basic amino acid residue;
[0823] Xₐₐ⁶ is any basic amino acid residue;
[0824] Xₐₐ⁷ is a Trp, 5-bromoTrp, 6-bromoTrp, 5-chloroTrp, 6-chloroTrp, 1-Nal, 2-Nal, or thioTrp residue;
[0825] Xₐₐ⁸ is a Leu or Nle residue;
[0826] Xₐₐ⁹ is a Trp, 5-bromoTrp, 6-bromoTrp, 5-chloroTrp, 6-chloroTrp, 1-Nal, 2-Nal, or thioTrp residue;
[0827] Xₐₐ¹⁰ is a basic or neutral hydrophilic amino acid residue, or an Ala residue;
[0828] Xₐₐ¹¹ is Cys if Xₐₐ²³ is Cys; or Xₐₐ¹¹ is SeCys if Xₐₐ²³ is SeCys;
[0829] Xₐₐ¹³ is any amino acid residue except a hydrophobic residue;
[0830] Xₐₐ¹⁴ is a basic residue or an Ala residue;
[0831] Xₐₐ¹⁶ is any amino acid residue;
[0832] Xₐₐ¹⁷ is a Cys if Xₐₐ²⁷ is Cys; or Xₐₐ¹⁷ is a SeCys if Xₐₐ²⁷ is SeCys;
[0833] Xₐₐ¹⁸ is a Cys or SeCys;
[0834] Xₐₐ¹⁹ is any amino acid residue;
[0835] Xₐₐ²⁰ is a Gly or Ala residue;
[0836] Xₐₐ²² is a basic amino acid residue or Ala residue;
[0837] Xₐₐ²³ is a Cys or SeCys residue;
[0838] Xₐₐ²⁴ is a basic amino acid residue or Ala residue;
[0839] Xₐₐ²⁶ is a Trp, 5-bromoTrp, 6-bromoTrp, 5-chloroTrp, 6-chloroTrp, 1-Nal, 2-Nal, or thioTrp residue;
[0840] Xₐₐ²⁷ is a Cys or SeCys residue;
[0841] Xₐₐ²⁸ is a basic amino acid residue;
[0842] Xₐₐ²⁹ is a basic amino acid residue;
[0843] Xₐₐ³⁰ is an Ile, Trp, Tyr, 5-bromoTrp, 6-bromoTrp, 5-chloroTrp, 6-chloroTrp, 1-Nal, 2-Nal, thioTrp, 1-Nal, or 2-Nal residue;
[0844] Xₐₐ³¹ is an Ile, Trp, Tyr, 5-bromoTrp, 6-bromoTrp, 5-chloroTrp, 6-chloroTrp, 1-Nal, 2-Nal, thioTrp, 1-Nal, or 2-Nal residue;
[0845] each of Xₐₐ³², Xₐₐ³³, and Xₐₐ³⁴ is independently absent or is independently a hydrophobic amino acid residue;
[0846] and wherein:

[0847] if Xₐₐ⁴ and Xₐₐ¹⁸ are both Cys residues, there is a disulfide bond between residue Xₐₐ⁴ and residue Xₐₐ¹⁸; or if Xₐₐ⁴ and Xₐₐ¹⁸ are both SeCys residues, there is a diselenide bond between residue Xₐₐ⁴ and residue Xₐₐ¹⁸;

[0848] if Xₐₐ¹¹ and Xₐₐ²³ are both Cys residues, there is a disulfide bond between residue Xₐₐ¹¹ and residue Xₐₐ²³; or if Xₐₐ¹¹ and Xₐₐ²³ are both SeCys residues, there is a diselenide bond between residue Xₐₐ¹¹ and residue Xₐₐ²³;

[0849] if Xₐₐ¹⁷ and Xₐₐ²⁷ are both Cys residues, there is a disulfide bond between residue Xₐₐ¹⁷ and residue Xₐₐ²⁷; or if Xₐₐ¹⁷ and Xₐₐ²⁷ are both SeCys residues, there is a diselenide bond between residue Xₐₐ¹⁷ and residue Xₐₐ²⁷;

[0850] the amino-terminal residue is optionally acetylated, biotinylated, or 4-pentynoylated, or PEGylated; and

[0851] the carboxy-terminal residue is optionally amidated.

[0852] 44. The composition of matter of Embodiment 43, wherein Xₐₐ² is a Pra, Aha, Abu, Nva, Nle, Sar, hLeu, hPhe, D-Leu, D-Phe, D-Ala, bAla, AllylG, CyA, Atz, Ala, Phe, Ile, Leu, Met, Val, Trp, Tyr, proline, thiaproline, methionine, glycine, 1-Nal, 2-Nal, 1′NMe-Trp, cyclopentylglycine (Cpg), phenylglycine, N-methylleucine, N-methylphenylalanine, N-methylvaline, cyclohexylglycine (Chg), cyclohexylalanine (Cha), 2-chloro-phenylalanine, 4-chloro-phenylalanine, 3,4-dichlorophenylalanine, 4-trifluoromethyl-phenylalanine, or 4-phenyl-phenylalanine (Bip) residue.

[0853] 45. The composition of matter of any of Embodiments 43-44, wherein Xₐₐ³⁰ is an Ile, Trp, or Tyr residue.

[0854] 46. The composition of matter of Embodiments 43-45, wherein the carboxy-terminal residue is amidated.

[0855] 47. The composition of matter of Embodiment 43, comprising an amino acid sequence selected from SEQ ID NO:247, SEQ ID NO:296, SEQ ID NO:358, SEQ ID NO:360, SEQ ID NO:361, SEQ ID NO:363, SEQ ID NO:364, SEQ ID NO:365, SEQ ID NO:366, SEQ ID NO:367, SEQ ID NO:368, SEQ ID NO:369, SEQ ID NO:370, SEQ ID NO:372, SEQ ID NO:373, SEQ ID NO:374, SEQ ID NO:375, SEQ ID NO:376, SEQ ID NO:377, SEQ ID NO:378, SEQ ID NO:379, SEQ ID NO:380, SEQ ID NO:381, SEQ ID NO:382, SEQ ID NO:383, SEQ ID NO:384, SEQ ID NO:385, SEQ ID NO:386, SEQ ID NO:387, SEQ ID NO:388, SEQ ID NO:389, SEQ ID NO:390, SEQ ID NO:391, SEQ ID NO:398, SEQ ID NO:399, SEQ ID NO:400, SEQ ID NO:401, SEQ ID NO:402, SEQ ID NO:403, SEQ ID NO:404, SEQ ID NO:405, SEQ ID NO:410, SEQ ID NO:423, SEQ ID NO:424, SEQ ID NO:425, SEQ ID NO:427, SEQ ID NO:431, SEQ ID NO:432, SEQ ID NO:433, SEQ ID NO:434, SEQ ID NO:438, SEQ ID NO:446, SEQ ID NO:453, SEQ ID NO:454, SEQ ID NO:571, SEQ ID NO:579, SEQ ID NO:580, SEQ ID NO:581, SEQ ID NO:582, SEQ ID NO:583, SEQ ID NO:584, SEQ ID NO:585, SEQ ID NO:586, SEQ ID NO:587, and SEQ ID NO:588.

[0856] 48. The composition of matter of any of Embodiments 1-47, further comprising an optional linker moiety and a pharmaceutically acceptable, covalently linked half-life extending moiety.

[0857] 49. The composition of matter of Embodiment 48, wherein the optional linker moiety is covalently linked at:

[0858] (a) the N-terminal residue;

[0859] (b) the C-terminal residue; or

[0860] (c) Xₐₐ², Xₐₐ³, Xₐₐ¹³, Xₐₐ¹⁶, or Xₐₐ¹⁹.

[0861] 50. The composition of matter of Embodiments 48-49, wherein the optional linker moiety is a multivalent linker.

[0862] 51. The composition of matter of Embodiments 48-50, wherein the half-life extending moiety is polyethylene glycol of molecular weight of about 1000 Da to about 100000 Da, an IgG Fc domain, a transthyretin, a human serum albumin, or a lipid or albumin binding peptide.

[0863] 52. The composition of matter of Embodiments 48-50, wherein the half-life extending moiety comprises a human immunoglobulin or a human immunoglobulin Fc domain, or both.

[0864] 53. The composition of matter of Embodiment 52 having a configuration as set forth in any of FIG. 81A-C, FIG. 94A-N, FIG. 95, FIG. 96, FIG. 97, or FIG. 98.

[0865] 54. The composition of matter of Embodiment 52, wherein the composition comprises a monovalent immunoglobulin-peptide or Fc-peptide conjugate.

[0866] 55. The composition of matter of Embodiment 52, wherein the composition comprises a bivalent immunoglobulin-peptide or Fc-peptide conjugate.

[0867] 56. The composition of matter of Embodiments 48-50, wherein the composition of matter comprises a human-serum albumin-peptide conjugate.

[0868] 57. The composition of matter of Embodiments 48-50, wherein the composition of matter comprises a lipidated peptide or serum albumin binding peptide-peptide conjugate.

[0869] 58. A pharmaceutical composition, comprising the composition of matter of any of Embodiments 1-57, and a pharmaceutically acceptable carrier.

[0870] 59. A method of preventing pain, comprising administering a prophylactically effective amount of the composition of any of Embodiments 1-58.

[0871] 60. A method of treating pain, comprising administering a therapeutically effective amount of the composition of any of Embodiments 1-58.

[0872] 61. The method of Embodiment 60, wherein the pain is chronic pain, acute pain, or persistent pain.

[0873] 62. The method of Embodiment 61, wherein the chronic pain is associated with cancer, chemotherapy, osteoarthritis, fibromyalgia, primary erythromelalgia, post-herpetic neuralgia, painful diabetic neuropathy, idiopathic painful neuropathy, neuromas, paroxysmal extreme pain disorder, migraine, trigeminal neuralgia, orofacial pain, cluster headaches, complex regional pain syndrome (CRPS), failed back surgery syndrome, sciatica, interstitial cystitis, pelvic pain, lower back pain, inflammation-induced pain, or joint pain.

[0874] 63. The method of Embodiment 61, wherein the acute or persistent pain is associated with trauma, burn, or surgery.

[0875] 64. An isolated nucleic acid encoding any of SEQ ID NO:63, SEQ ID NO:69, SEQ ID NO:112, SEQ ID NO:113, SEQ ID NO:115, SEQ ID NO:131, SEQ ID NO:137, SEQ ID NO:193, SEQ ID NO:194, SEQ ID NO:195, SEQ ID NO:196, SEQ ID NO:200, SEQ ID NO:201, SEQ ID NO:202, SEQ ID NO:203, SEQ ID NO:207, SEQ ID NO:208, SEQ ID NO:209, SEQ ID NO:210, SEQ ID NO:214, SEQ ID NO:215, SEQ ID NO:216, SEQ ID NO:217, SEQ ID NO:221, SEQ ID NO:222, SEQ ID NO:223, SEQ ID NO:224, SEQ ID NO:228, SEQ ID NO:229, SEQ ID NO:230, SEQ ID NO:231, SEQ ID NO:235, SEQ ID NO:236, SEQ ID NO:237, SEQ ID NO:238, SEQ ID NO:242, SEQ ID NO:243, SEQ ID NO:244, SEQ ID NO:245, SEQ ID NO:246, SEQ ID NO:277, or SEQ ID NO:279, that does not include a non-canonical amino acid.

[0876] 65. An expression vector comprising the nucleic acid of Embodiment 64.

[0877] 66. A recombinant host cell comprising the expression vector of Embodiment 65.

[0878] The following working examples are illustrative and not to be construed in any way as limiting the scope of the present invention.

### EXAMPLES

### Example 1

### Isolation and Purification of JzTx-V (SEQ ID NO:2) from Venom

[0879] Venom Sample Preparation.

[0880] Venom from the tarantula Chilobrachys jingzhao was extracted via electrical stimulation of an anesthetized spider. Venom samples were collected, lyophilized, and dissolved in 0.1% trifluoroacetic acid (TFA) in water to approximately 1 mg venom/mL. The crude venom solutions were desalted by solid-phase extraction (SPE) with Sep-Pak C18 cartridges (Waters, Milford, Mass., USA) equilibrated in 0.1% TFA, and eluted with 60% aqueous acetonitrile and then evaporated. The dried material was dissolved in 0.1% TFA to 1 mg venom/mL concentration and higher molecular components removed with a 10 kDa molecular weight cut-off Ultrafree-CL (Millipore). The <10 kDa venom extract was then dried under in vacuo and stored at −80° C.

[0881] Fractionation.

[0882] The crude venom was fractionated by reversed phase (RP) HPLC, collecting 84 samples in time slices. Less than 10 kDa venom extracts were dissolved in 0.1% TFA to approximately 1 mg venom/mL, and then separated by C18 RP HPLC chromatography and collected into approximately 1 minute wide fractions. HPLC method: Buffer A (0.1% TFA in water) and buffer B (90% acetonitrile/10% water containing 0.1% TFA) at 1 mL/min with a 1%/min gradient 0-100% buffer B. The fractions were then transferred into a plate format, dried under in vacuo, and then stored at −80° C.

[0883] The venom fractions were screened for activity in the Na_{V}1.7 IonWorks® Quatrro (IWQ) assays. Several fractions with significant (>50% of control) Nav1.7 inhibitory activity were identified. A second aliquot of the fractions was tested in the Na_{V}1.7, Na_{V}1.4, and Na_{V}1.5 IWQ assays to confirm the activity of the “hit” and evaluate selectivity. The most potent and selective fractions were then separated by RP-HPLC, and the corresponding sub-fractions were screened for activity in the Na_{V}1.7,Nav1.4, and Na_{V}1.5 assays. Deconvolution of the most active sub-fraction revealed the primary peptide sequence of JzTx-V (SEQ ID NO:2). As with all proteins, JzTx-V is expected to have essentially zero access to the central nervous system.

[0884] JzTx-45 (YCQKWMWTCDSERKCCEGYVCELWCKYNL//SEQ ID NO:48) and JzTx-46 (YCQKWMWTCDSERKCCEGYVCELWCKYNM//SEQ ID NO:430) were identified through transcriptomic analysis of the venom gland of Chilobrachys jingzhao using expressed sequence tag methodologies. (See, Chen J, Deng M, He Q, Meng E, Jiang L, Liao Z, Rong M, Liang S, “Molecular diversity and evolution of cystine knot toxins of the tarantula Chilobrachys jingzhao”, Cellular and Molecular Life Sciences 2008, 65:2431-2444; Siang A S, Doley R, Vonk F J, Kini R M., “Transcriptomic analysis of the venom gland of the red-headed krait (Bungarus flaviceps) using expressed sequence tags”, BMC Molecular Biology 2010, 11:24; Jiang Y, Li Y, Lee W, Xu X, Zhang Y, Zhao R, Zhang Y, Wang W., “Venom gland transcriptomes of two elapid snakes (Bungarus multicinctus and Naja atra) and evolution of toxin genes”, BMC Genomics 2011, 12:1; Wagstaff S C, Sanz L, Juárez P, Harrison R A, Calvete J J., “Combined snake venomics and venom gland transcriptomic analysis of the ocellated carpet viper, Echis ocellatus.”, J Proteomics. 2009 71(6):609-23; Magalhaes G S, Junqueira-de-Azevedo I L, Lopes-Ferreira M, Lorenzini D M, Ho P L, Moura-da-Silva A M. “Transcriptome analysis of expressed sequence tags from the venom glands of the fish Thalassophryne nattereri”, Biochimie 2006 88(6):693-9; Wagstaff S C, Harrison R A., “Venom gland EST analysis of the saw-scaled viper, Echis ocellatus, reveals novel alpha9beta1 integrin-binding motifs in venom metalloproteinases and a new group of putative toxins, renin-like aspartic proteases.” Gene 2006 377:21-32).

[0885] Peptide Sequencing: Edman Degradation and De Novo MS/MS.

[0886] N-terminal sequencing of peptides were performed by Edman degradation (Reference: (1) Edman, P. (1950), “Method for determination of the amino acid sequence in peptides”, Acta Chem. Scand. 4: 283-293; (2) Niall, H. D. (1973). “Automated Edman degradation: the protein sequenator”. Meth. Enzymol. 27: 942-1010). Phenylthiohydantoin (PTH)—amino acid derivatives were analyzed with an Applied Biosystems automatic 473A sequencer.

[0887] De novo peptide sequencing was accomplished by tandem mass spectrometry (References: Vlado Dan\check{c}ík, Theresa A. Addona, Karl R. Clauser, James E. Vath, Pavel A. Pevzner., J. Comp. Biol., Volume 6, 3/4, (1999); (2) Favreau, P., Menin, L., Michalet, S., Perret, F., Cheneval, Stöcklin, M., Bulet, A. and Stöcklin, R., Toxicon, 47(6), 676-687, (2006), (3) Favreau, P., Cheneval, O., Menin, L., Michalet, S., Gaertner, H., Principaud, F., Thai, R., Ménez, A., Bulet, P. and Stöcklin, R. (2007), The venom of the snake genus Atheris contains a new class of peptides with clusters of histidine and glycine residues. Rapid Communications in Mass Spectrometry, 21: 406-412).

### Example 2

### Synthesis of JzTx-V Peptide Analogs

[0888] Small-scale peptide synthesis. Peptides were assembled using N^{α}-Fmoc solid-phase peptide synthesis methodologies with appropriate orthogonal protection and resin linker strategies. The peptides were synthesized on a 0.012 mmol scale using Rink Amide MBHA resin (100-200 mesh, 1% DVB, RFR-1063-PI, 0.52 meq/g initial loading, 408291, Peptides International, Louisville, Ky.). Dry resin (17 mg per well) was added to a Phenomenex deep well protein precipitation plate (CEO-7565, 38710-1) using a resin loader (Radley) Amino acids were added to the growing peptide chain by stepwise addition using standard solid phase methods on an automated peptide synthesizer (Intavis Multipep). Amino acids (5 molar equivalents, 120 μL, 0.5 M in DMF) were pre-activated (1 min) with (1-Cyano-2-ethoxy-2-oxoethylidenaminooxy)dimethylamino-morpholino-carbenium hexafluorophosphate (COMU®; 5 molar equivalents, 170 μL, 0.35 M in dimethylformamide (DMF)) and N,N-Diisopropylethylamine (DIEA; 7.5 molar equivalents, 70 μL, 1.25 M in dichloromethane (DCM)). Pre-activated amino acids were transferred to the appropriate well. Resins were incubated for 30 min, drained, and the cycle repeated. Following the 2^{nd} amino acid incubation the plates were drained and washed with DMF 8 times (3 mL per column of 8 wells). The Fmoc protecting groups were then removed by 2 sequential incubations in 500 μL of a 20% piperidine in DMF solution. The 1^{st} incubation was 5 min, the resin drained, and the 2^{nd} incubation was for 20 min. The resin was drained and washed with DMF 10 times (3 mL per column of 8 wells). After removal of the final Fmoc protecting group, the resin was washed with DCM 5 times (3 mL per column of 8 wells) and allowed to air dry.

[0889] Cleavage.

[0890] To the bottom of the filter plate was affixed a drain port sealing mat (ArcticWhite, AWSM-1003DP). To the resin in each well was added triisopropylsilane (100 μL), DODT (100 μL), and water (100 μL) using a multichannel pipette. To the resin in each well was added TFA (1 mL) using a Dispensette Organic dispenser. A second sealing mat was affixed to the top of the plate, and the solution was mixed for 3 h on a shaker. The sealing mats were removed from the top then the bottom, and the cleavage solution was eluted into a solid bottom 96-well deep well plate. The resin in each well was washed with and additional 1 mL of TFA. The solutions were concentrated using rotary evaporation (Genevac). To each well in a new 96-well filter plate with a bottom sealing mat attached was added 1 mL of cold diethyl ether using a Dispensette Organic dispenser. To the ether was added the concentrated peptide solutions using a multichannel pipette with wide bore tips. The solution was agitated with the pipette to ensure complete mixing and precipitation. The white solid was filtered, washed with a second 1 mL of cold ether, filtered, and dried under vacuum.

[0891] Folding.

[0892] To the crude peptide in each well was added 0.9 mL of 50:50 water/acetonitrile with a multichannel pipette and a micro stir bar. The mixture was stirred for 1 h. The solution was filtered into a solid bottom 96-well deep well plate. To the crude peptide in each well was added another 0.9 mL of 50:50 water/acetonitrile with a multichannel pipette. The solution was filtered into the same solid bottom 96-well deep well plate. In a 4 L bottle was prepared 4.0 L of folding buffer (3.3 L water, 300 mL acetonitrile, 2.0 g oxidized glutathione, 1.0 g reduced glutathione, 400 mL 1 M Tris-HCl pH 7.5). To 96 50-mL centrifuge tubes was added 40 mL of peptide folding buffer using a Dispensette dispenser. To the folding buffer was added the 1.8 mL of dissolved peptide using the Tecan automated liquid handler. The pH of the folding solutions was measured to about 7.7. The folding reactions were allowed to stand overnight. To each tube was added 1 mL of glacial acetic acid. To a 96-well filter plate was added SP Sepharose High Performance as a slurry (1 mL per well) with a multichannel pipette. Using the Tecan automated liquid handler, the gel was conditioned with folding buffer (3×0.9 mL), loaded with the folded peptide solution (50×0.9 mL, pH=4.0, on the Tecan automated liquid handler), washed (4×0.9 mL, 20 mM NaOAc, pH=4.0), and eluted manually on a vacuum manifold with 2×1 mL (1 M NaCl, 20 mM NaOAc, pH=4.0) into a solid bottom 96-well deep well plate.

[0893] Conjugation of Peptides to PEG.

[0894] Some JzTx-V peptide analogs were conjugated to azido-NPEG10 (e.g., see, FIG. 76A-B, Table 9 and Table 13, below). To 1 mL of the folded peptide in the IEX elution buffer was added in order 32-azido-3,6,9,12,15,18,21,24,27,30-decaoxadotriacontan-1-amine (70 μL, 50 mM aq.), tris(2-phenyl-1-(1H-1,2,3-triazol-4-yl)ethyl)amine (TBTA; 88 μL, 10 mM in DMSO), L-ascorbic acid sodium salt (438 μL, 75 mM aq.), and copper (ii) sulfate, anhydrous, powder (188 μL, 35 mM aq.). The reaction mixture turned slightly cloudy after the addition of the TBTA. After overnight incubation, the plate was centrifuged for 1 h at 1600 rpm to pellet any precipitate. The supernatant was transferred to a 96-well filter plate with a multichannel pipette and filtered into a solid bottom 96-well plate.

[0895] Purification and Characterization of Molecules.

[0896] The folded (conjugated) peptide (2 mL) was purified by mass-triggered semi-prep HPLC (Agilent 1100/LEAP, Jupiter 5 μm C18 300 A, 100×10 mm 5 micron) with a gradient of 15-35% B over 45 min, with a 5 min flush, and 5 min equilibration at 8 mL/min. The collected fractions were pooled and reformatted into vials on the Tecan automated liquid handler. Final QC (Phenomenex Jupiter 20×2 mm, 100 Å, 5 micron column eluted with a 10 to 60% B over 10 min gradient at a 0.750 mL/min flow rate monitoring absorbance at 220 nm) and CLND quantification were performed. Peptides with >95% purity and correct (m/z) ratio were screened. (See FIG. 1, FIG. 2, and FIG. 3 for LC-MS characterization of synthetic JzTx-V).

[0897] In subsequent synthesis runs, the protocol was modified in order to improve the overall success rate of obtaining folded peptide analogs in sufficient purity for assay submission. Peptides were synthesized in duplicate, triplicate, or quadruplicate on the Intavis synthesizer. The crude linear peptide was combined, dissolved in DMSO, and purified immediately by prep LC/MS (Phenomenex Synergi 4 μm MAX-RP 80A AXIA, 250×30 mm) at 30 mL/min, Agilent/LEAP prep LC-MS, 10-40% B gradient over 60 min, followed by a 10 min flush and a 10 min equilibration). The fractions were analyzed by LC-MS, pooled, and lyophilized to afford pure linear peptide. The pure linear peptide was dissolved in 2 mL of acetonitrile and 2 mL of water and folded as described previously for the crude peptide. After quenching, the folded peptide solution was loaded directly onto a semi-prep HPLC column using a prep loading pump at 8 mL/min. The column was flushed with 10% acetonitrile in water with 0.1% trifluoroacetic acid (TFA) to remove the acetic acid and then attached to the semi-prep LC-MS and purified as described previously.

[0898] Medium-Scale Peptide Synthesis.

[0899] Rink Amide Chem Matrix resin (0.2 mmol, 0.45 mmol/g loading, 0.444 g, Matrix Innovation) was weighed into a CS BIO reaction vessel. The reaction vessel was connected to a channel of the CS BIO 336X automated peptide synthesizer, and the resin was washed 2×DMF and allowed to swell in DMF for 15 min. Fmoc-amino acid (1.0 mmol, Midwest Biotech or Novabiochem) was dissolved in 2.5 mL of 0.4 M 6-chloro-1-hydroxybenzotriazole (6-Cl-HOBt, Matrix Innovation) in DMF. To the solution was added 1.0 mL of 1.0 M 1,3-diisopropylcarbodiimide (DIC, Sigma-Aldrich) in DMF. The solution was agitated with nitrogen bubbling for 15 min to accomplish pre-activation and then added to the resin. The mixture was shaken for 2 h. The resin was filtered and washed 3×DMF, 2×DCM, and 3×DMF. Fmoc-removal was accomplished by treatment with 20% piperdine in DMF (5 mL, 2×15 min, Fluka). The resin was filtered and washed 3×DMF. All residues were single coupled through repetition of the Fmoc-amino acid coupling and Fmoc removal steps described above.

[0900] Cleavage and Linear Peptide Purification.

[0901] After final Fmoc-removal from the N-terminal residue, resin-bound linear peptide (0.2 mmol scale) was transferred to a 25 mL solid phase extraction (SPE) filter tube, washed 3×DMF and 3×DCM, and dried under vacuum. To the resin was added triisopropylsilane (1.0 mL), 3,6-dioxa-1,8-octane-dithiol (DODT, 1.0 mL), water (1.0 mL), trifluoroacetic acid (TFA, 15 mL), and a stir bar, and the mixture was stirred for 3 h. The mixture was filtered into a 50 mL centrifuge tube. The resin was washed with TFA (˜5 mL), and the combined filtrate was concentrated by rotary evaporation in a Genevac HT-12 (30° C. chamber temperature, pressure ramp from 500 to 50 mbar over 40 min and a final pressure of 8 mbar for 2 h). To the residue (˜5 mL) was added 40 mL cold diethyl ether. A white precipitate formed. The solid was stirred in the ether. The mixture was centrifuged (4 min, 4,400 rpm), and the ether was decanted. To the tube was added another 40 mL of cold ether, and the precipitate was stirred. The mixture was centrifuged, and the ether was decanted. The solid was dried overnight under vacuum. The crude linear peptide was purified by preparative LC-MS. The filtered sample (300 mg in 5 mL DMSO) was injected onto a preparative HPLC column (Phenomenex Synergi 4 μm MAX-RP 80A AXIA, 250×30 mm) The peptide was eluted with a 10-40% B over 60 min gradient at 30 mL/min, followed by a 10 min flush and a 10 min equilibration. The fractions were analyzed by LC-MS, pooled, and lyophilized to afford pure the linear peptide precursor.

[0902] Folding.

[0903] In a 1-L PP bottle was prepared a folding buffer with water (800 mL), acetonitrile (100 mL), cysteine (1 mL of a 1 M stock solution in water), and cystine dihydrochloride (6.667 mL of a 150 mM stock solution in water). To the pure linear peptide (100 mg) was added 5 mL acetonitrile and 5 mL water. The mixture was vortexed to complete dissolution of the peptide. The peptide solution was added to the buffer followed by 1M Tris-HCl pH 8.0 (100 mL), (0.1 mg/mL peptide concentration, 1 mM cysteine, 1 mM cystine, 10% v/v acetonitrile, 0.1 M Tris pH 8.0). The pH value was measured to be 8.0. The folding mixture was allowed to stand at 4° C. for 18 to 72 h. A small aliquot was removed and the sample was analyzed by LC-MS to ensure that the folding was complete. The solution was quenched by the addition of 4 mL AcOH and 4 mL TFA (pH=2.5). The aqueous solution was filtered (0.45 μM cellulose membrane).

[0904] Purification.

[0905] The filtered solution (1000 mL, 100 mg peptide) was loaded onto a preparative HPLC column (Phenomenex Synergi 4 μm MAX-RP 80A AXIA, 250×30 mm) at 30 mL/min using an Agilent preparative loading pump. The column was flushed for 10 min with 10% B at 30 mL/min to elute the AcOH/TFA. The column was attached to a prep HPLC, Agilent/LEAP prep LC-MS, and the peptide was eluted with a 10-40% B gradient over 60 min, followed by a 10 min flush and a 10 min equilibration. The fractions were analyzed by LC-MS, pooled, and lyophilized to afford pure folded peptide.

[0906] Large-Scale Peptide Synthesis.

[0907] Rink Amide MBHA resin (2.0 mmol, 0.52 mmol/g loading, 3.846 g, Peptides International) was weighed into a large CS BIO reaction vessel attached to one channel of the CS BIO 536, and the resin was washed 2×30 mL with DMF and allowed to swell in DMF for 15 min. Fmoc-amino acid (20 mmol, GL Biochem) was dissolved in 50 mL (total volume) of DMF (0.4 M). To 20 mL of the 0.4 M amino acid solution was added 20 mL of 0.4 M 6-Cl-HOBt (Matrix Innovation) and 10 mL of 0.8 M DIC (Sigma-Aldrich) in DMF. The solution was incubated for 10 min to accomplish pre-activation and then added to the resin. The mixture was stirred with nitrogen bubbling for 2 h. The resin was filtered and washed 5×30 mL of DMF. Fmoc-removal was accomplished by treatment with 20% piperdine in DMF (50 mL, 2×15 min, Fluka). The resin was filtered and washed 3×30 mL of DMF. Residues were single coupled through repetition of the Fmoc-amino acid coupling and Fmoc removal steps described above in a single run. Ile, Leu, and Gly residues were double coupled.

[0908] Cleavage.

[0909] The resin-bound linear peptide (2.0 mmol scale) was washed 3×50 mL of DMF and 3×50 mL of DCM, and dried under vacuum in a 500 mL fitted glass synthesis funnel To the resin was added triisopropylsilane (10 mL), 3,6-dioxa-1,8-octane-dithiol (DODT, 10 mL), water (10 mL), and trifluoroacetic acid (TFA, 400 mL), and the mixture was allowed to stand for 1.5 h with occasional stirring. The mixture was filtered into a 5 L round bottom flask (plastic+glass). The resin was washed with TFA (3×100 mL), and the combined filtrate was concentrated by rotary evaporation on the RotaVap (temp=20° C., pressure=80 to 60 mbar over a 30-minute period). To the residue was 1 L of cold diethyl ether. A white precipitate formed. The solid was shaken in the ether. The mixture was filtered using a 600 mL C fritted glass funnel To the solid was added 200 mL of cold ether, and the precipitate was stirred. The mixture was filtered. The solid was washed with an additional 200 mL of ether. The solid was scraped out of the funnel into a 1 L round bottom flask and dried under vacuum overnight to give 6.0 g of crude linear peptide. A small sample was removed for LC-MS analysis (5-50% B over 5 min)

[0910] Purification of Crude Linear Peptide.

[0911] A 0.1 M solution of TCEP in DMSO was prepared fresh for dissolution of the peptide. The solid peptide was crushed to a fine powder using a spatula. To the solid peptide (1000 mg) was added 0.1 M TCEP in DMSO (10 mL), and the mixture was vortexed for several minutes to complete dissolution. The solution was filtered using a syringe filter (0.45 micron, nylon) and injected immediately onto a large-scale prep HPLC column (Phenomenex Jupiter C18 10 μm 300A, 100×50 mm, Varian hardware) and eluted with a gradient of 15-45% B over 90 minutes with a 10 minute flush and 35 minute equilibration at a flow rate of 80 mL/min on an Agilent 1200 prep HPLC. This process was repeated 5 more times, injecting 1.0 g of peptide dissolved in 10 mL of DMSO solution each time. The fractions were analyzed by LC-MS and pooled to afford linear peptide in ˜90% purity.

[0912] Folding.

[0913] A 15% yield from the crude linear purification (150 mg pure from 1000 mg crude) was assumed, and the peptide was folded at ˜0.3 mg/mL. The good pool of purified linear peptide from above (170 mL of ˜30% acetonitrile in water) was diluted to 510 mL (final volume) of folding buffer containing water, cysteine (1 mM), and cystine (1 mM) to give appropriate concentrations of acetonitrile (10% v/v final concentration) and peptide (0.3 mg/mL). To the peptide solution was added 1.0 M Tris-HCl, pH 8.0, 50 mL, to give a final volume of 560 mL. The pH value was measured to be 8.0. The folding mixture was shaken gently at 4° C. for 36 h. A small aliquot was removed and the sample was analyzed by LC-MS. Refolding was judged to be complete. TFA was added (˜1.6 mL) to lower the pH of the solution to <2.5. The quenched peptide solution was filtered (0.45 micron cellulose membrane) and purified by prep RP-HPLC.

[0914] Purification.

[0915] The filtered solution of folded peptide, 560 mL, was loaded onto a prep HPLC column (Phenomenex Synergi 4 μm MAX-RP 80A, AXIA, 250×30 mm) at 40 mL/min using an Agilent prep loading pump. The column was then flushed for 10 min with 10% B at 30 mL/min to elute the TFA. The column was attached to a prep LC-MS, Agilent 1100/LEAP prep LC-MS, and eluted with a gradient of 15-35% B over 45 minutes with a 5 minute flush and 10 minute equilibration at a flow rate of 30 mL/min. The fractions were analyzed by LC-MS, pooled, and lyophilized to afford dry peptide. The process was repeated with the remaining folded peptide solution. Expected overall yield was 300 mg dry weight.

[0916] Counterion Exchange for Peptide In Vivo Studies.

[0917] A 4 mL SPE tube containing VariPure IPE (Varian, PL-HCO3 MP-Resin, polymer-supported hydrogencarbonate, 1.8 mmol/g, 100A, 150-300 μm) was pre-conditioned with 2 mL of MeOH, followed by 2 mL of water, draining by gravity. 2.0 mL of a ≦5.0 mM solution of purified folded peptide in water was applied to the bed. The device was washed with 4×2.0 mL of water to elute all of the peptide. To the eluent was added 50 μL of acetic acid. The solution was concentrated by rotary evaporation (Genevac) to afford the acetate salt of the purified folded peptide. A 100 mM stock solution of trifluoroethanol (TFE) in deuterium oxide (D2O) was prepared fresh by weighing 50 mg of TFE into a 5 mL volumetric flask, followed by addition of D2O to a final volume of 5 mL. A 5 mM solution of TFE in D2O was then prepared by dilution for dissolving all samples for 19F-NMR. The solution was used to dissolve peptide to a concentration of 1 mM, and the sample was analyzed by 19F-NMR using a fluorine long delay (d1=5 sec) method. The TFE integral (triplet at −76.75 ppm) was normalized to 5 and the integral of TFA (singlet at −75.6) recorded. NMR tube was cut, and sample was recovered by rotary evaporation (Genevac).

### Example 3

### Electrophysiology

[0918] Cell Lines Expressing Nav Channels.

[0919] Stable cell lines constitutively expressing human (h), mouse (m), or rat (r) voltage-gated sodium (Nav) channels (CHO-hNav1.3, HEK293-hNav1.4, HEK293-hNav1.5, HEK293-hNav1.6, HEK293-mNav1.7, HEK293T-rNav1.7, and HEK293-hNav1.7) or CHO cells expressing hNav1.8 under an inducible promoter were used for experiments.

[0920] Ion-Works® Quatro Population Patch Clamp Electrophysiology.

[0921] Adherent cells were isolated from tissue culture flasks using 0.25% trypsin-EDTA treatment for 10 minutes and were resuspended in external solution consisting of 140 mM NaCl, 5.0 mM KCl, 10 mM HEPES, 2 mM CaCl₂, 1 mM MgCl₂, 10 mM Glucose, pH 7.4. Internal solution consisted of 70 mM KCl, 70 mM KF, 10 HEPES, 5 mM EDTA, pH 7.3. Cells were voltage clamped, using the perforated patch clamp configuration at room temperature (˜22° C.), to −110 mV and depolarized to −10 mV before and 5 min after test compound addition. Compound dilutions contained 0.1% bovine serum albumin to minimize non-specific binding. Peak inward currents were measured from different cells for each compound concentration and IC₅₀ values were calculated with Excel software. All compounds were tested in duplicate (n=2).

[0922] PatchXpress® 7000A Electrophysiology.

[0923] Adherent cells were isolated from tissue culture flasks using 1:10 diluted 0.25% trypsin-EDTA treatment for 2-3 minutes and then were incubated in complete culture medium containing 10% fetal bovine serum for at least 15 minutes prior to resuspension in external solution consisting of 70 mM NaCl, 140 mM D-Mannitol, 10 mM HEPES, 2 mM CaCl₂, 1 mM MgCl₂, pH 7.4 with NaOH. Internal solution consisted of 62.5 mM CsCl, 75 mM CsF, 10 HEPES, 5 mM EGTA, 2.5 mM MgCl₂, pH 7.25 with CsOH. Cells were voltage clamped using the whole cell patch clamp configuration at room temperature (˜22° C.) at a holding potential of −125 mV with test potentials to −10 mV (hNav1.3, hNav1.4, hNav1.6, mNav1.7, rNav1.7, and hNav1.7) or −20 mV (hNav1.5). To record from partially inactivated channels, cells were switched to a voltage that yielded ˜20% channel inactivation. Test compounds were added and Nay currents were monitored at 0.1 Hz at the appropriate test potential. All compound dilutions contained 0.1% bovine serum albumin to minimize non-specific binding. Cells were used for additional compound testing if currents recovered to >80% of starting values following compound washout. IC₅₀ values were calculated by pooling single point determinations at different compound concentrations and fitting the resulting dataset with a Hill (4-parameter logistic) fit in DataXpress 2.0 software.

[0924] Whole Cell Patch Clamp Electrophysiology.

[0925] Cells were voltage clamped using the whole cell patch clamp configuration at room temperature (˜22° C.). Pipette resistances were between 1.5 and 2.0 MΩ. Whole cell capacitance and series resistance were uncompensated. Currents were digitized at 50 kHz and filtered (4-pole Bessel) at 10 kHz using pClamp 10.2. Cells were lifted off the culture dish and positioned directly in front of a micropipette connected to a solution exchange manifold for compound perfusion. To record from non-inactivated channels, cells were held at −140 mV or −120 mV and depolarized to −10 mV or 0 mV. To record from partially inactivated channels, cells were held at −140 mV or −120 mV initially and then switched to a voltage that yielded ˜20% channel inactivation. 10 ms pulses were delivered every 10 seconds and peak inward currents were recorded before and after compound addition. Compound dilutions contained 0.1% bovine serum albumin to minimize non-specific binding. For hNav1.8 channel recordings, tetrodotoxin (TTX, 0.5 μM) was added to inhibit endogenous TTX-sensitive voltage-gated sodium channels and record only Nav1.8-mediated TTX-resistant currents. External solution consisted of: 140 mM NaCl, 5.0 mM KCl, 2.0 mM CaCl₂, 1.0 mM MgCl₂, 10 mM HEPES, and 11 mM Glucose, pH 7.4 by NaOH. Internal solution consisted of: 62.5 mM CsCl, 75 mM CsF, 2.5 mM MgCl₂, 5 mM EGTA, and 10 mM HEPES, pH 7.25 by CsOH. Escalating compound concentrations were analyzed on the same cell and IC₅₀ values were calculated with Clampfit 10.2 software and by fitting the resulting dataset with a Hill (4-parameter logistic) fit in Origin Pro 8 software.

[0926] DRG Neuron Isolation.

[0927] Adult male and female C57BL/6 mice (Harlan Laboratories and Charles River) and adult male Sprague Dawley rats (Charles River) were euthanized with sodium pentobarbital (Nembutal, 80 mg/kg, i.p., Western Med Supply, Arcadia, Calif.) or carbon dioxide asphyxiation followed by decapitation. DRG from cervical, thoracic and lumbar regions were removed, placed in Ca²⁺ and Mg²⁺-free Hanks' Balanced Salt Solution (Invitrogen, Carlsbad, Calif.), and trimmed of attached fibers under a dissecting microscope. DRG were sequentially digested at 37° C. with papain (20 U/ml, Worthington Biochemical Corporation, Lakewood, N.J.) and L-cysteine (25 μM) in Ca²⁺ and Mg²⁺-free Hanks' (pH 7.4) for 20-30 min and then with collagenase type 2 (0.9% w/v, Worthington Biochemical Corporation) for 20-30 min. Digestions were quenched with a 1:1 mixture of DMEM and Ham's F-12 Nutrient Mixture (Invitrogen) supplemented with 10% calf serum (Invitrogen), and cells were triturated with a fire-polished Pasteur pipette prior to plating on Poly-D-Lysine-coated glass coverslips (Cole-Parmer, Vernon Hills, Ill.). Cells were used for recordings following 1-2 hours of recovery (acute isolation) or maintained in a humidified incubator at 28° C. with 5% CO₂ for up to 10 days in the presence of 1% NSF-1 (Lonza, Basel, Switzerland) or B-27 supplement (Life Technologies) to increase the expression of tetrodotoxin-sensitive sodium channel currents.

[0928] Manual Patch-Clamp Electrophysiology for DRG Neurons.

[0929] DRG neurons were voltage clamped using the whole-cell patch clamp configuration at room temperature (21-24° C.) using an Axopatch 200 B or MultiClamp 700 B amplifier and DIGIDATA 1322A with pCLAMP software (Molecular Devices, Sunnyvale, Calif.). Pipettes, pulled from borosilicate glass capillaries (World Precision Instruments, Sarasota, Fla.), had resistances between 1.0 and 3.0 MΩ. Voltage errors were minimized using >80% series resistance compensation. A P/4 protocol was used for leak subtraction. Currents were digitized at 50 kHz and filtered (4-pole Bessel) at 10 kHz. Cells were lifted off the culture dish and positioned directly in front of a micropipette connected to a solution exchange manifold for compound perfusion. Cells were held at −120 mV or a voltage yielding approximately 20% inactivation and depolarized to −10 or 0 mV for 40 msec every 10 seconds. Tetrodotoxin (TTX, Sigma) was used following peptide addition to block any residual TTX-sensitive sodium currents. Pipette solution contained (in mM): 62.5 CsCl, 75 CsF, 2.5 MgCl₂, 5 EGTA, and 10 HEPES, pH 7.25 by CsOH. Bath solution contained (in mM): 70 NaCl, 5.0 KCl, 2.0 CaCl₂, 1.0 MgCl₂, 10 HEPES, and 11 glucose, 140 mannitol, pH 7.4 by NaOH. Data were analyzed with Clampfit and Origin Pro8 (OriginLab Corp, Northampton, Mass.).

[0930] Results of Electrophysiology Studies and Structure-Activity Relationship.

[0931] Results of electrophysiology studies are shown in Table 6, Table 7, Table 8, Table 9, Table 10 (IWQ), Table 11, Table 12, Table 13 (PX), Table 14 (WCPC), Table 15, and Table 16 (PX) below. Extensive systematic analoging using high-throughput peptide synthesis, parallel oxidative folding, and mass-triggered semi-prep HPLC purification for peptide analog preparation has given considerable insight into how individual positions within JzTx-V(1-29) (SEQ ID NO:2) contribute to its overall VGSC activity profile. Concerning the overall molecular framework, the disulfide bonds (or diselenide bonds) between Cys2 (or SeCys2) and Cys16 (or SeCys16) (C1-C4), between Cys9 (or SeCys9) and Cys21 (or SeCys21) (C2-C5) and between Cys15 (or SeCys15) and Cys25 (or SeCys25) (C3-C6) are essential for full function.

[0932] The N-terminal portion of JzTx-V(1-29) (SEQ ID NO:2), including residues Tyr1, Gln3, and Lys4, is amenable to modification without affecting either VGSC potency or selectivity in comparison with wild type JzTx-V. (See Table 6). Extension of the polypeptide chain by coupling an additional amino acid or acids to the N-terminus is well-tolerated and even improves the potency of the peptide against hNav1.7. (See Table 10). A set of N-terminally extended [Nle6]JzTx-V peptide analogs was prepared and tested in the hNav1.7, hNav1.4, and hNav1.5 PX assays. (See Table 11). Several peptides containing a hydrophobic residue at the N-terminus had improved potency against hNav1.7. They also had improved selectivities against hNav1.4 and hNav1.5 due to their increased hNav1.7 activity. Pra-[Nle6]JzTx-V(1-29) (SEQ ID NO:425) is nearly 200-fold more potent than the wild type JzTx-V(1-29) (SEQ ID NO:2) against hNav1.7 in the WCPC format with IC₅₀ values of 0.845 pM and 162 pM, respectively. (See Table 14). Tyr1 of JzTx-V can be substituted with a variety of amino acids with no impact on potency at Na_{V}1.7 or selectivity against Na_{V}1.4 and Na_{V}1.5. (See Table 6). [Glu1]JzTx-V(1-29) (SEQ ID NO:49) may have slightly increased potency against hNav1.7 with an accompanying small increase in selectivity against hNav1.4 and hNav1.5 in the PX assay format. (See Table 11). Gln3 and Lys4 in JzTx-V may be individually replaced with a basic amino acid such as arginine and still retain potency against Na_{V}1.7. (See Table 6).

[0933] Hydrophobic residues at positions 5, 6, and 7 (Trp5, Met6, and Trp7 in JzTx-V), in relation to SEQ ID NO:2, are essential to Na_{V}1.7 inhibitory potency. Only [1-Nal7]JzTx-V (SEQ ID NO:30) retained hNav1.7 activity similar to the wild type peptide. (See Table 6 and Table 11). Substitution of homophenylalanine at position 5 as in Pra-[hPhe5; Nle6; Glu28]JzTx-V(1-29) (SEQ ID NO:844) was found to increase hNav1.7 activity. (See Table 12). A variety of hydrophobic residues including norleucine, leucine and phenylalanine can be incorporated at position 6 to maintain good potency against Nav1.7 and selectivity against Nav1.4 in the PX assay format without the potential liability of oxidation by the native methionine residue. (See Table 10, Table 11, and Table 12).

[0934] While each position has recognizable preferences, the sequence of amino acids from Thr8 to Lys22 is quite tolerant of individual substitutions, with possible exceptions for the cysteines (SeCys substitutions permitted), Asp10, and Leu19 relative to SEQ ID NO:2. (See Table 6). Peptides synthesized without an aspartic acid residue at position 10 of JzTx-V have not been isolated in sufficiently pure form for screening, indicating this residue may be critical for proper folding of the peptide. Examples of peptides containing alanine, lysine, arginine, or glutamic acid at position 19 of JzTx-V had greatly reduced activity against hNav1.7. (See Table 12). Basic or neutral hydrophilic amino acids are acceptable as substitutions for Thr8 and Ser11, relative to SEQ ID NO:2, to maintain Na_{V}1.7 inhibitory potency. (See Table 6). Substitution of glutamic acid for Ser11 in combination with Glu28 also maintains potency against hNav1.7 in the PX assay. (See Table 12). Incorporation of propargylglycine at position 11 may increase Nav1.7 potency as observed with CyA-[Nle6; Pra11; Glu28]JzTx-V(1-29) (SEQ ID NO:520). (See Table 12). Arg13 appears to be the most sensitive residue in this portion of the sequence as substitution with either alanine or lysine caused a significant loss in potency. Lys12, Ala14, and Glu17, relative to SEQ ID NO:2, can be substituted with a variety of amino acids including attachment of a large PEG moiety with little effect on potency against Na_{V}1.7. (See Table 6, Table 9, Table 12, and Table 13). The combination of Glu12 or Glu14 substitutions with Glu28 resulted in JzTx-V analogs, such as Pra-[Nle6; Glu12,28]JzTx-V(1-29) (SEQ ID NO:715) and Pra-[Nle6; Glu14,28]JzTx-V(1-29) (SEQ ID NO:717), with potent Nav1.7 inhibitory activity and increased selectivity against Nav1.4. (See Table 12). Incorporation of a lysine residue at position 17 relative to SEQ ID NO:2 improved the yield of the oxidative folding reaction of the linear peptide to form the final disulfide-bonded product. Gly18 is somewhat sensitive to substitution as even incorporation of alanine at this position resulted in a slight loss of Nav1.7 potency. (See Table 6). Substitution of an acidic residue for arginine at position 20 relative to SEQ ID NO:2 greatly improves selectivity against hNav1.4 to greater than 1000-fold relative to hNav1.7, i.e., [Glu20]JzTx-V (SEQ ID NO:63) has an IC50 value of 1.25 μM against hNav1.4 in the PX assay format compared to an average IC50 value of 2 nM for JzTx-V(1-29) (SEQ ID NO:2). (See Table 6 and Table 11). The replacement of Arg20 with the charge-neutral citrulline also retains Nav1.7 activity as demonstrated by Pra-[Nle6; Cit20,26; Glu28]JzTx-V(1-29) (SEQ ID NO:799). (See Table 12). Lys22 of JzTx-V (SEQ ID NO:2), may be substituted with a basic amino acid and retain full Nav1.7 inhibitory potency. (See Table 6).

[0935] The C-terminal portion of the JzTx-V sequence is critical for the activity of the peptide against Na_{V}1.7. The leucine at position 23 of JzTx-V (SEQ ID NO:2) appears to be very important to obtaining high levels of potency against Na_{V}1.7, but is may be substituted with aliphatic hydrophobic residues like isoleucine, norleucine, or norvaline with retention of potency. (See Table 12). Incorporation of cyclohexylglycine as in Pra-[Nle6; Chg23,Glu28]JzTx-V (SEQ ID NO:859) may increase potency against hNav1.7. (See Table 12). The tryptophan residue at position 24 of JzTx-V (SEQ ID NO:2) is also very important for retaining potency against Nav1.7. An analog with a large hydrophobic substitution, [1-Nal24]JzTx-V(1-29) (SEQ ID NO:43), loses considerable activity against hNav1.7, but substitution on the indole ring is tolerated and improves Nav1.7 inhibitory potency, as demonstrated by Pra-[Nle6; 5-BrW24; Glu28]JzTx-V(1-29) (SEQ ID NO:858). (See Table 6, Table 11, and Table 12). Substitution of the arginine residue at position 26 of JzTx-V with glutamic acid, [Glu26]JzTx-V(1-29) (SEQ ID NO:67), greatly decreases the Nav1.7 inhibitory activity, but the neutral hydrophilic residue citrulline is tolerated as described above. (See Table 11 and Table 12). Lys27, relative to SEQ ID NO:2, may be substituted with a basic residue and retain Nav1.7 inhibitory potency. (See Table 6). The isoleucine at position 28 of JzTx-V (SEQ ID NO:2) can be substituted with a variety of amino acid residues with retention of potency against Na_{V}1.7, but the substitution of glutamic acid at this position increases selectivity by reducing activity against Na_{V}1.4. (See Table 6, Table 11, and Table 12). The Glu28 substitution to improve Nav1.4 selectivity is effective in combination with a large number of other amino acid substitutions at other positions in the JzTx-V scaffold. The isoleucine at position 29 of JzTx-V(1-29) (SEQ ID NO:2) can be substituted with other hydrophobic amino acids without losing potency against Na_{V}1.7. (See Table 6 and Table 12). Incorporating a phenylalanine at position 29 may increase Nav1.7 potency as demonstrated by Pra-[Nle6; Glu28; Phe29]JzTx-V(1-29). (See Table 12). The combination analog [Glu20,Trp29]JzTx-V(1-29) (SEQ ID NO:112) retains the excellent Nav1.4 selectivity (>1000-fold) characteristic of the substitution of glutamic acid at position 20 but has hNav1.7 potency similar to wild type JzTx-V with an average hNav1.7 IC50 value of 1.5 nM in the PX format. (See Table 7 and Table 11). Additional analogs of JzTx-V(1-29) (SEQ ID NO:2) that combine individual substitutions have demonstrated further improvements in selectivity against Na_{V}1.4 and Na_{V}1.5 and potency toward Nav1.7, i.e., [Glu20,Tyr28]JzTx-V(1-29) (SEQ ID NO:137) and [Glu20,Ser28]JzTx-V(1-29) (SEQ ID NO:138). (See Table 7, Table 8, and Table 11). The C-terminus of JzTx-V can be extended and/or prepared as the free acid with only a slight loss in potency, as demonstrated by JzTx-V(1-29)-FreeAcid (SEQ ID NO:1) and Pra-[Nle6; Glu28]JzTx-V(1-29)-Gly-Free Acid (SEQ ID NO:828).

[0936] Manual whole cell patch clamp electrophysiology was performed on JzTx-V(1-29) (SEQ ID NO:2) on human clones of Nav1.8, Nav1.7, Nav1.5, Nav1.4, and Nav1.3. (See Table 14.) Testing with 1.0 μM JzTx-V with 0.5 μM TTX showed only partial inhibition of the hNav1.8 current. (See, FIG. 4). The effects of JzTx-V addition in increasing concentrations and wash out on hNav1.8 current were recorded. (See, FIG. 5). The average IC₅₀ value of hNav1.8 inhibition for JzTx-V was 530 nM. (See, FIG. 6). Testing with 1 nM JzTx-V showed complete inhibition of the hNav1.7 current. (See, FIG. 7). The effects of JzTx-V addition in increasing concentrations and wash out on hNav1.7 current were recorded. (See FIG. 8). The average IC₅₀ value of hNav1.7 inhibition for JzTx-V was 0.1615 nM. (See FIG. 9). Testing with 3.0 μM JzTx-V showed nearly complete inhibition of the hNav1.5 current. (See FIG. 10). The effects of JzTx-V addition in increasing concentrations and wash out on hNav1.5 current were recorded. (See FIG. 11). The average IC₅₀ value of hNav1.5 inhibition for JzTx-V was 426.5 nM. (See FIG. 12). Testing with 100 nM JzTx-V showed complete inhibition of the hNav1.4 current. (See FIG. 13). The effects of JzTx-V addition in increasing concentrations and wash out on hNav1.4 current were recorded. (See FIG. 14). The average IC₅₀ value of hNav1.4 inhibition for JzTx-V was 9.35 nM for the partially inactivated state. (See FIG. 15). Testing with 300 nM JzTx-V showed complete inhibition of the hNav1.3 current. (See FIG. 16). The effects of JzTx-V addition in increasing concentrations and wash out on hNav1.3 current were recorded. (See FIG. 17). The average IC₅₀ value of hNav1.3 inhibition for JzTx-V was 12.25 nM. (See FIG. 18). These results demonstrate that JzTx-V (SEQ ID NO:2) is a potent peptide inhibitor of hNav1.7 with 50-fold selectivity against hNav1.3 and hNav1.4 and 2000-fold selectivity against hNav1.5 and hNav1.8. Manual whole cell patch clamp electrophysiology was also performed on [Glu20,Trp29]JzTx-V(1-29) (SEQ ID NO:112) and Pra-[Nle6]JzTx-V(1-29) (SEQ ID NO:425) on the human clone of Nav1.7. Testing with 100 nM [Glu20,Trp29]JzTx-V(1-29) showed only partial inhibition of the hNav1.7 current. (See FIG. 19). The effects of [Glu20,Trp29]JzTx-V(1-29) addition in increasing concentrations and wash out on hNav1.7 current were recorded. (See FIG. 20). The average IC₅₀ value of hNav1.7 inhibition for [Glu20,Trp29]JzTx-V(1-29) was 0.23 nM. (See FIG. 21). These results demonstrate that [Glu20,Trp29]JzTx-V(1-29) is also a potent inhibitor of hNav1.7. Testing with 100 pM Pra-[Nle6]JzTx-V(1-29) showed complete inhibition of the hNav1.7 current (fully non-inactivated state). (See FIG. 22). The effects of Pra-[Nle6]JzTx-V(1-29) addition in increasing concentrations and wash out on hNav1.7 current (fully non-inactivated state) were recorded. (See FIG. 23). The average IC₅₀ value of hNav1.7 inhibition (fully non-inactivated state) for Pra-[Nle6]JzTx-V(1-29) was 0.4085 pM. (See FIG. 24). Testing with 100 pM Pra-[Nle6]JzTx-V(1-29) showed complete inhibition of the hNav1.7 current (partially inactivated state). (See FIG. 25). The effects of Pra-[Nle6]JzTx-V(1-29) addition in increasing concentrations and wash out on hNav1.7 current (partially inactivated state) were recorded. (See FIG. 26). The average IC₅₀ value of hNav1.7 inhibition (partially inactivated state) for Pra-[Nle6]JzTx-V(1-29) was 0.8445 pM. (See FIG. 27). These results demonstrate that Pra-[Nle6]JzTx-V(1-29) is an extremely potent inhibitor of hNav1.7 in the WCPC format with a 190-fold improvement in potency over the wild type JzTx-V. Manual whole cell patch clamp electrophysiology was also performed with Pra-[Nle6,Glu28]JzTx-V(1-29) (SEQ ID NO:328) on the human clones of Nav1.1, Nav1.2, Nav1.3, Nav1.4, Nav1.5, Nav1.6, Nav1.7, and Nav1.8. (See FIGS. 102-125 and Table 14). These results demonstrate that Pra-[Nle6,Glu28]JzTx-V(1-29) (SEQ ID NO:328) has sub-nanomolar potency against Nav1.7 with >30-fold selectivity against other human VGSCs. Manual whole cell patch clamp electrophysiology was also performed with Pra-[Nle6; 5-BrW24; Glu28]JzTx-V(1-29) (SEQ ID NO:858) on the human clone of Nav1.7. (See FIGS. 156-158 and Table 14). These results confirm that Pra-[Nle6; 5-BrW24; Glu28]JzTx-V(1-29) (SEQ ID NO:858) is a sub-nanomolar potent inhibitor of hNav1.7.

[0937] Manual patch clamp electrophysiology was performed on JzTx-V(1-29) (SEQ ID NO:2), [Glu20,Trp29]JzTx-V(1-29) (SEQ ID NO:112), Pra-[Nle6]JzTx-V(1-29) (SEQ ID NO:425), CyA-[Nle6,Lys(Pra)14,Glu28]JzTx-V (SEQ ID NO:392), CyA-[Nle6,Pra17,Glu28]JzTx-V (SEQ ID NO:395), Pra-[Nle6,Glu28]JzTx-V(1-29) (SEQ ID NO:328), CyA-[Nle6,Atz(NPEG10)17,Glu28]JzTx-V(1-29) (SEQ ID NO:443), Pra-[Nle6; Glu12,28]JzTx-V(1-29) (SEQ ID NO:715), Pra-[Nle6; Glu14,28]JzTx-V(1-29) (SEQ ID NO:717), and Pra-[Nle6,5-BrW24,Glu28]JzTx-V(1-29) (SEQ ID NO:858) on isolated mouse DRG neurons. (See Table 14.) Testing with 1 μM JzTx-V showed almost complete inhibition of the TTX-sensitive sodium current in mouse DRG neurons. (See, FIG. 28). The effects of JzTx-V addition in increasing concentrations and wash out on TTX-sensitive sodium channel current in mouse DRG neurons were recorded. (See FIG. 29). The IC₅₀ value of TTX-sensitive sodium channel current inhibition for JzTx-V was 18 nM. (See FIG. 30). Testing of 1 μM JzTx-V with 0.5 μM TTX showed only partial inhibition of the TTX-resistant sodium current in mouse DRG neurons. (See, FIG. 31). The effects of JzTx-V addition in increasing concentrations and wash out on TTX-resistant sodium channel current in mouse DRG neurons were recorded. (See FIG. 32). The IC₅₀ value of TTX-resistant sodium channel current inhibition for JzTx-V was not measurable. Testing with 300 nM [Glu20,Trp29]JzTx-V(1-29) showed only partial inhibition of the TTX-sensitive sodium current in cultured (10 days) mouse DRG neurons. (See, FIG. 33). The effects of [Glu20,Trp29]JzTx-V(1-29) addition in increasing concentrations and wash out on TTX-sensitive sodium channel current in cultured mouse DRG neurons (10 days) were recorded. (See FIG. 34). The IC₅₀ value of TTX-sensitive sodium channel current inhibition in cultured DRG neurons (10 days) for [Glu20,Trp29]JzTx-V(1-29) was 279 nM. (See FIG. 35). Testing with 1 μM [Glu20,Trp29]JzTx-V(1-29) showed only partial inhibition of the TTX-sensitive sodium current in acutely isolated mouse DRG neurons. (See, FIG. 36). The effects of [Glu20,Trp29]JzTx-V(1-29) addition in increasing concentrations and wash out on TTX-sensitive sodium channel current in acutely isolated mouse DRG neurons were recorded. (See FIG. 37). The IC₅₀ value of TTX-sensitive sodium channel current inhibition in acutely isolated DRG neurons for [Glu20,Trp29]JzTx-V(1-29) was 211 nM. (See FIG. 38). Testing with 1 nM Pra-[Nle6]JzTx-V(1-29) showed almost complete inhibition of the TTX-sensitive sodium current in mouse DRG neurons. (See, FIG. 39). The effects of Pra-[Nle6]JzTx-V(1-29) addition in increasing concentrations and wash out on TTX-sensitive sodium channel current in mouse DRG neurons were recorded. (See FIG. 40). The IC₅₀ value of TTX-sensitive sodium channel current inhibition with a holding voltage yielding 20% inactivation for Pra-[Nle6]JzTx-V(1-29) was 5.35 nM. (See FIG. 41). Testing with 300 nM CyA-[Nle6,Lys(Pra)14,Glu28]JzTx-V(1-29) showed almost complete inhibition of the TTX-sensitive sodium current in mouse DRG neurons. (See, FIG. 42). The effects of CyA-[Nle6,Lys(Pra)14,Glu28]JzTx-V(1-29) addition in increasing concentrations and wash out on TTX-sensitive sodium channel current in mouse DRG neurons were recorded. (See FIG. 43). The IC₅₀ value of TTX-sensitive sodium channel current inhibition with a holding voltage yielding 20% inactivation for CyA-[Nle6,Lys(Pra)14,Glu28]JzTx-V(1-29) was 46.6 nM. (See FIG. 44). Testing with 300 nM CyA-[Nle6,Pra17,Glu28]JzTx-V(1-29) showed complete inhibition of the TTX-sensitive sodium current in mouse DRG neurons. (See, FIG. 45). The effects of CyA-[Nle6,Pra17,Glu28]JzTx-V(1-29) addition in increasing concentrations and wash out on TTX-sensitive sodium channel current in mouse DRG neurons were recorded. (See FIG. 46). The IC₅₀ value of TTX-sensitive sodium channel current inhibition with a holding voltage yielding 20% inactivation for CyA-[Nle6,Pra17,Glu28]JzTx-V(1-29) was 15.9 nM. (See FIG. 47). These results show that JzTx-V(1-29) is a potent inhibitor of TTX-sensitive but not TTX-resistant sodium channel current in mouse DRG neurons. [Glu20,Trp29]JzTx-V(1-29) is a much less potent inhibitor of TTX-sensitive sodium channel current in mouse DRG neurons than the wild type peptide with a nearly 1000-fold loss in potency relative to the human clone of Nav1.7. Pra-[Nle6]JzTx-V(1-29) is about 3-fold more potent than JzTx-V in the inhibition of TTX-sensitive sodium channel current in mouse DRG neurons. CyA-[Nle6,Pra17,Glu28]JzTx-V(1-29) is equipotent with the wild type peptide in the inhibition of TTX-sensitive sodium channel current in mouse DRG neurons. CyA-[Nle6,Lys(Pra)14,Glu28]JzTx-V(1-29) is about 3-fold less potent than JzTx-V in the inhibition of TTX-sensitive sodium channel current in mouse DRG neurons. Manual patch clamp electrophysiology was performed on a variety of other compounds on isolated mouse DRG neurons, including CyA-[Nle6,Pra17,Glu28]JzTx-V (SEQ ID NO:395), Pra-[Nle6,Glu28]JzTx-V(1-29) (SEQ ID NO:328), CyA-[Nle6,Atz(NPEG10)17,Glu28]JzTx-V (SEQ ID NO:443), Pra-[Nle6,Glu12,28]JzTx-V(1-29) (SEQ ID NO:715), Pra-[Nle6,Glu14,28]JzTx-V(1-29) (SEQ ID NO:717), Pra-[Nle6,5-BrW24,Glu28]JzTx-V(1-29) (SEQ ID NO:858), and Immunglobulin Peptide Conjugates 3, 5, 7, and 8. (See FIGS. 99-102, 129-131, 135-155, and 172-175 and Table 14). These results confirm that Pra-[Nle6; 5-BrW24; Glu28]JzTx-V(1-29) (SEQ ID NO:858) is a single digit-nanomolar inhibitor of TTX-S current in mDRG neurons.

[0938] Manual patch clamp electrophysiology was performed on [Glu20,Trp29]JzTx-V(1-29) (SEQ ID NO:112), CyA-[Nle6,Pra17,Glu28]JzTx-V (SEQ ID NO:395), and Pra-[Nle6,Glu28]JzTx-V(1-29) (SEQ ID NO:328) on isolated rat DRG neurons. (See FIGS. 126-128 and 132-134). The IC₅₀ value of TTX-sensitive sodium channel current inhibition in acutely isolated rat DRG neurons for [Glu20,Trp29]JzTx-V(1-29) was 261 nM. These results were similar to those obtained with mouse DRG neurons for this compound. Other analogs were more potent inhibitors of TTX-S current in rat DRG neurons. The IC₅₀ value of TTX-sensitive sodium channel current inhibition in acutely isolated rat DRG neurons for CyA-[Nle6,Glu28]JzTx-V(1-29) was 9.25 nM. The IC₅₀ value of TTX-sensitive sodium channel current inhibition in acutely isolated rat DRG neurons for Pra-[Nle6,Glu28]JzTx-V(1-29) was 30.7 nM.

[0939] JzTx-V peptide analog Pra-[Nle6,Glu28]JzTx-V(1-29) (SEQ ID NO:328) was profiled by manual patch clamp electrophysiology on hNav1.1 (IC50=27.2 nM), hNav1.2 (IC50=44.4 nM), hNav1.3 (IC50=52.51 nM), hNav1.4 (IC50=74.6 nM), hNav1.5 (IC50=>1000 nM), hNav1.6 (IC50=19.45 nM), hNav1.7 (IC50=0.62 nM), and hNav1.8 (IC50=>1000 nM). These results demonstrate that Pra-[Nle6,Glu28]JzTx-V(1-29) is a potent inhibitor of hNav1.7 with >30-fold selectivity against other human VGSCs. Another peptide analog with good potency in the hNav1.7 PX assay was found to also be potent in the manual patch clamp hNav1.7 assay; Pra-[Nle6; 5-BrW24; Glu28]JzTx-V (SEQ ID NO:858) had an IC50 value of 0.130 nM.

[0940] A subset of Nav1.7 inhibitory peptides was profiled against hNav1.6 using the PatchXpress electrophysiology platform. (See Table 15). Potent Nav1.7 inhibitory peptide Pra-[Nle6]JzTx-V(1-29) (SEQ ID NO:425) was also found to be quite potent against hNav1.6 with an IC50 value of 68 nM. Incorporation of a glutamic acid residue at position 20 or 28 greatly increased the selectivity by reducing the activity against Nav1.6, similar to what had be observed previously for Nav1.4. This is exemplified by [Glu20,Trp29]JzTx-V(1-29) (SEQ ID NO:112) and [Glu28]JzTx-V(1-29) having IC50 values of 720 and 248 nM against Nav1.6 and being 454- and 437-fold selective for Nav1.7 over Nav1.6, respectively. The Glu28 modification was effective at increasing Nav1.6 selectivity in combination with a variety of other amino acid substitutions at different positions in the JzTx-V peptide scaffold. For example, Pra-[Nle6,Glu28]JzTx-V(1-29) (SEQ ID NO:328) was 334-fold selective against Nav1.6. Combination of a glutamic acid at position 28 with another glutamic acid substitution at the N-terminus, position 11, 12, or 14 resulted in a further reduction in Nav1.6 potency with a concomitant increase in selectivity to >500-fold. Some compounds with increased Nav1.7 potency, including Pra-[Nle6; 5-BrW24; Glu28]JzTx-V(1-29) (SEQ ID NO:858) and Pra-[hPhe5; Nle6; Glu28]JzTx-V(1-29) (SEQ ID NO:844), also exhibited a higher level of Nav1.6 selectivity.

[0941] A set of Nav1.7 inhibitory peptides was profiled against the rodent Nav clones rat Nav1.7, mouse Nav1.7, and mouse Nav1.4 using the PatchXpress electrophysiology platform in order to correlate activities across different species. (See Table 16). A very small shift (<2-fold) was observed for human vs. rat Nav1.7 potencies. In general, a slightly larger shift was observed for human vs. mouse potencies, with some compounds being >10-fold less potent against mNav1.7 than hNav1.7, though some compounds did exhibit single-digit nanomolar and even subnanomolar potencies against mNav1.7. The slight reduction in mNav1.7 potencies also reduced the selectivity against mNav1.4, with most compounds being between 10- and 30-fold selective for mNav1.7 over mNav1.4.

TABLE 6
Electrophysiology by IonWorks ® Quattro:
comparison of JzTx-V (SEQ ID NO: 2) and
single substitution JzTx-V peptide analogs.

| SEQ | | | IC50 (μM) | | | | |
|---|---|---|---|---|---|---|---|
| ID | | | | | | | Nav1.4/ |
| NO. | Designation | Sequence | Nav1.7 | Nav1.5 | Nav1.4 | Nav1.3 | Nav1.7 |
| 1 | JzTx-V(1-29)-FreeAcid | YC1QKWMWTC2DSKRAC3C1EGLR | 0.17 | >5 | 0.61 | 0.78 | 4 |
| | | C2KLWC3RKII{Amide} | | | | | |
| 2 | JzTx-V(1-29) | YC1QKWMWTC2DSKRAC3C1EGLR | 0.005 | 3.0 | 0.09 | 0.08 | 17 |
| | | C2KLWC3RKII{Amide} | | | | | |
| 2 | JzTx-V(1-29) | YC1QKWMWTC2DSKRAC3C1EGLR | 0.006 | 3.5 | 0.12 | 0.10 | 20 |
| | | C2KLWC3RKII{Amide} | | | | | |
| 3 | [Ala1]JzTx-V(1-29) | AC1QKWMWTC2DSKRAC3C1EGLR | 0.004 | 3.1 | 0.07 | 0.04 | 18 |
| | | C2KLWC3RKII{Amide} | | | | | |
| 25 | [1-Nal]pzTx-V(1-29) | [1-Nal]C1QKWMWTC2DSKRAC3 | 0.008 | 2.3 | 0.09 | 0.07 | 10 |
| | | C1EGLRC2KLWC3RKII{Amide} | | | | | |
| 49 | [Glu1]JzTx-V(1-29) | EC1QKWMWTC2DSKRAC3C1EGLR | 0.018 | >5.0 | 0.23 | 0.16 | 13 |
| | | C2KLWC3RKII{Amide} | | | | | |
| 71 | [Lys1]JzTx-V(1-29) | KC1QKWMWTC2DSKRAC3C1EGLR | 0.005 | 2.3 | 0.06 | 0.05 | 12 |
| | | C2KLWC3RKII{Amide} | | | | | |
| 90 | [Arg1]JzTx-V(1-29) | RC1QKWMWTC2DSKRAC3C1EGLR | 0.005 | 1.8 | 0.12 | 0.04 | 24 |
| | | C2KLWC3RKII{Amide} | | | | | |
| 91 | [Arg3]JzTx-V(1-29) | YC1RKWMWTC2DSKRAC3C1EGLR | 0.025 | 3.2 | 0.14 | 0.06 | 6 |
| | | C2KLWC3RKII{Amide} | | | | | |
| 92 | [Arg4]JzTx-V(1-29) | YC1QRWMWTC2DSKRAC3C1EGLR | 0.014 | 2.0 | 0.16 | 0.07 | 11 |
| | | C2KLWC3RKII{Amide} | | | | | |
| 7 | [Ala6]JzTx-V(1-29) | YC1QKWAWTC2DSKRAC3C1EGLR | 0.094 | >5 | 0.28 | 0.16 | 3 |
| | | C2KLWC3RKII{Amide} | | | | | |
| 8 | [Ala7]JzTx-V(1-29) | YC1QKWMATC2DSKRAC3C1EGLR | 0.15 | >5 | 0.69 | 0.94 | 5 |
| | | C2KLWC3RKII{Amide} | | | | | |
| 30 | [1-Nal7]JzTx-V(1-29) | YC1QKWM[1-Nal]TC2DSKRAC3 | 0.013 | 3.6 | 0.12 | 0.10 | 9 |
| | | C1EGLRC2KLWC3RKII{Amide} | | | | | |
| 54 | [Glu7]JzTx-V(1-29) | YC1QKWMETC2DSKRAC3C1EGLR | 0.56 | >5.0 | 2.6 | 2.8 | 5 |
| | | C2KLWC3RKII{Amide} | | | | | |
| 75 | [Lys7]JzTx-V(1-29) | YC1QKWMKTC2DSKRAC3C1EGLR | 0.080 | >5.0 | 0.43 | 0.31 | 5 |
| | | C2KLWC3RKII{Amide} | | | | | |
| 95 | [Arg7]JzTx-V(1-29) | YC1QKWMRTC2DSKRAC3C1EGLR | 0.053 | >5.0 | 0.40 | 0.08 | 8 |
| | | C2KLWC3RKII{Amide} | | | | | |
| 9 | [Ala8]JzTx-V(1-29) | YC1QKWMWAC2DSKRAC3C1EGLR | 0.025 | >5 | 0.25 | 0.21 | 10 |
| | | C2KLWC3RKII{Amide} | | | | | |
| 76 | [Lys8]JzTx-V(1-29) | YC1QKWMWKC2DSKRAC3C1EGLR | 0.031 | 3.7 | 0.10 | 0.10 | 3 |
| | | C2KLWC3RKII{Amide} | | | | | |
| 96 | [Arg8]JzTx-V(1-29) | YC1QKWMWRC2DSKRAC3C1EGLR | 0.018 | 1.7 | 0.14 | 0.05 | 7 |
| | | C2KLWC3RKII{Amide} | | | | | |
| 11 | [Ala11]JzTx-V(1-29) | YC1QKWMWTC2DAKRAC3C1EGLR | 0.012 | 3.6 | 0.16 | 0.14 | 13 |
| | | C2KLWC3RKII{Amide} | | | | | |
| 57 | [Glu11]JzTx-V(1-29) | YC1QKWMWTC2DEKRAC3C1EGLR | 0.039 | >5.0 | 0.38 | 0.19 | 10 |
| | | C2KLWC3RKII{Amide} | | | | | |
| 78 | [Lys11]JzTx-V(1-29) | YC1QKWMWTC2DKKRAC3C1EGLR | 0.008 | 1.1 | 0.11 | 0.05 | 13 |
| | | C2KLWC3RKII{Amide} | | | | | |
| 98 | [Arg11]JzTx-V(1-29) | YC1QKWMWTC2DRKRAC3C1EGLR | 0.007 | 0.86 | 0.09 | 0.03 | 12 |
| | | C2KLWC3RKII{Amide} | | | | | |
| 12 | [Ala12]JzTx-V(1-29) | YC1QKWMWTC2DSARAC3C1EGLR | 0.022 | >5.0 | 0.26 | 0.15 | 12 |
| | | C2KLWC3RKII{Amide} | | | | | |
| 99 | [Arg12]JzTx-V(1-29) | YC1QKWMWTC2DSRRAC3C1EGLR | 0.008 | 2.5 | 0.15 | 0.05 | 19 |
| | | C2KLWC3RKII{Amide} | | | | | |
| 13 | [Ala13]JzTx-V(1-29) | YC1QKWMWTC2DSKAAC3C1EGLR | 0.079 | >5 | 0.57 | 0.30 | 7 |
| | | C2KLWC3RKII{Amide} | | | | | |
| 79 | [Lys13]JzTx-V(1-29) | YC1QKWMWTC2DSKKAC3C1EGLR | 0.064 | >5.0 | 0.47 | 0.12 | 7 |
| | | C2KLWC3RKII{Amide} | | | | | |
| 60 | [Glu14]JzTx-V(1-29) | YC1QKWMWTC2DSKREC3C1EGLR | 0.020 | >5.0 | 0.23 | 0.11 | 12 |
| | | C2KLWC3RKII{Amide} | | | | | |
| 80 | [Lys14]JzTx-V(1-29) | YC1QKWMWTC2DSKRKC3C1EGLR | 0.007 | 1.5 | 0.07 | 0.03 | 10 |
| | | C2KLWC3RKII{Amide} | | | | | |
| 100 | [Arg14]JzTx-V(1-29) | YC1QKWMWTC2DSKRRC3C1EGLR | 0.008 | 1.4 | 0.08 | 0.04 | 11 |
| | | C2KLWC3RKII{Amide} | | | | | |
| 14 | [Ala17]JzTx-V(1-29) | YC1QKWMWTC2DSKRAC3C1AGLR | 0.008 | 2.0 | 0.06 | 0.08 | 8 |
| | | C2KLWC3RKII{Amide} | | | | | |
| 37 | [1-Nal17]JzTx-V(1-29) | YC1QKWMWTC2DSKRAC3C1[1- | 0.033 | 2.2 | 0.13 | 0.11 | 4 |
| | | Nal]GLRC2KLWC3RKII{Amide} | | | | | |
| 81 | [Lys17]JzTx-V(1-29) | YC1QKWMWTC2DSKRAC3C1KGLR | 0.010 | 0.89 | 0.05 | 0.03 | 5 |
| | | C2KLWC3RKII{Amide} | | | | | |
| 101 | [Arg17]JzTx-V(1-29) | YC1QKWMWTC2DSKRAC3C1RGLR | 0.014 | 0.95 | 0.06 | 0.04 | 4 |
| | | C2KLWC3RKII{Amide} | | | | | |
| 15 | [Ala18]JzTx-V(1-29) | YC1QKWMWTC2DSKRAC3C1EALR | 0.040 | >5.0 | 0.26 | 0.24 | 7 |
| | | C2KLWC3RKII{Amide} | | | | | |
| 17 | [Ala20]JzTx-V(1-29) | YC1QKWMWTC2DSKRAC3C1EGLA | 0.009 | >5 | 0.42 | 0.26 | 46 |
| | | C2KLWC3RKII{Amide} | | | | | |
| 63 | [Glu20]JzTx-V(1-29) | YC1QKWMWTC2DSKRAC3C1EGLE | 0.073 | >5.0 | 4.6 | 2.5 | 63 |
| | | C2KLWC3RKII{Amide} | | | | | |
| 84 | [Lys20]JzTx-V(1-29) | YC1QKWMWTC2DSKRAC3C1EGLK | 0.020 | 3.4 | 0.26 | 0.06 | 13 |
| | | C2KLWC3RKII{Amide} | | | | | |
| 18 | [Ala22]JzTx-V(1-29) | YC1QKWMWTC2DSKRAC3C1EGLR | 0.062 | >5 | 0.41 | 0.52 | 7 |
| | | C2ALWC3RKII{Amide} | | | | | |
| 104 | [Arg22]JzTx-V(1-29) | YC1QKWMWTC2DSKRAC3C1EGLR | 0.016 | 2.0 | 0.17 | 0.08 | 11 |
| | | C2RLWC3RKII{Amide} | | | | | |
| 19 | [Ala23]JzTx-V(1-29) | YC1QKWMWTC2DSKRAC3C1EGLR | 0.30 | >5 | 0.34 | 0.44 | 1 |
| | | C2KAWC3RKII{Amide} | | | | | |
| 42 | [1-Nal23]JzTx-V(1-29) | YC1QKWMWTC2DSKRAC3C1EGLR | 0.050 | 1.5 | 0.17 | 0.17 | 3 |
| | | C2K[1-Nal]WC3RKII{Amide} | | | | | |
| 65 | [Glu23]JzTx-V(1-29) | YC1QKWMWTC2DSKRAC3C1EGLR | 4.0 | >5.0 | >5.0 | 2.0 | 1 |
| | | C2KEWC3RKII{Amide} | | | | | |
| 85 | [Lys23]JzTx-V(1-29) | YC1QKWMWTC2DSKRAC3C1EGLR | 0.24 | 4.1 | 0.29 | 0.14 | 1 |
| | | C2KKWC3RKII{Amide} | | | | | |
| 105 | [Arg23]JzTx-V(1-29) | YC1QKWMWTC2DSKRAC3C1EGLR | 0.15 | 2.8 | 0.21 | 0.15 | 1 |
| | | C2KRWC3RKII{Amide} | | | | | |
| 43 | [1-Nal24]JzTx-V(1-29) | YC1QKWMWTC2DSKRAC3C1EGLR | 0.075 | >5 | 0.33 | 0.46 | 4 |
| | | C2KL[1-Nal]C3RKII{Amide} | | | | | |
| 106 | [Arg24]JzTx-V(1-29) | YC1QKWMWTC2DSKRAC3C1EGLR | 5.0 | >5.0 | 2.5 | 4.8 | 1 |
| | | C2KLRC3RKII{Amide} | | | | | |
| 107 | [Arg27]JzTx-V(1-29) | YC1QKWMWTC2DSKRAC3C1EGLR | 0.028 | >5.0 | 0.23 | 0.10 | 8 |
| | | C2KLWC3RRII{Amide} | | | | | |
| 23 | [Ala28]JzTx-V(1-29) | YC1QKWMWTC2DSKRAC3C1EGLR | 0.030 | >5 | 0.29 | 0.25 | 10 |
| | | C2KLWC3RKAI{Amide} | | | | | |
| 46 | [1-Nal28]JzTx-V(1-29) | YC1QKWMWTC2DSKRAC3C1EGLR | 0.006 | 3.6 | 0.10 | 0.06 | 17 |
| | | C2KLWC3RK[1-Nal]I{Amide} | | | | | |
| 69 | [Glu28]JzTx-V(1-29) | YCHIKWMWTC2DSKRAC3C1EGLR | 0.028 | >5.0 | 0.83 | 0.33 | 30 |
| | | C2KLWC3RKEI{Amide} | | | | | |
| 88 | [Lys28]JzTx-V(1-29) | YC1QKWMWTC2DSKRAC3C1EGLR | 0.014 | 1.5 | 0.11 | 0.05 | 8 |
| | | C2KLWC3RKKI{Amide} | | | | | |
| 108 | [Arg28]JzTx-V(1-29) | YC1QKWMWTC2DSKRAC3C1EGLR | 0.026 | 1.8 | 0.14 | 0.06 | 5 |
| | | C2KLWC3RKRI{Amide} | | | | | |
| 24 | [Ala29]JzTx-V(1-29) | YC1QKWMWTC2DSKRAC3C1EGLR | 0.053 | >5 | 0.27 | 0.45 | 5 |
| | | C2KLWC3RKIA{Amide} | | | | | |
| 70 | [Glu29]JzTx-V(1-29) | YC1QKWMWTC2DSKRAC3C1EGLR | 0.28 | >5.0 | >5.0 | 5.0 | 18 |
| | | C2KLWC3RKIE{Amide} | | | | | |
| 89 | [Lys29]JzTx V(1 29) | YC1QKWMWTC2DSKRAC3C1EGLR | 0.11 | >5.0 | 1.3 | 2.4 | 11 |
| | | C2KLWC3RKIK{Amide} | | | | | |
| 109 | [Arg29]JzTx-V(1-29) | YC1QKWMWTC2DSKRAC3C1EGLR | 0.067 | >5.0 | 1.1 | 1.3 | 16 |
| | | C2KLWC3RKIR{Amide} | | | | | |
| 48 | JzTx-45 | YCQKWMWTCDSERKCCEGYVCELW | 0.084 | >5 | 2.4 | 1.8 | 28 |
| | | CKYNL{Amide} | | | | | |
| 430 | JzTx-46 | YCQKWMWTCDSERKCCEGYVCELW | 0.33 | >5 | >5 | 5 | 15 |
| | | CKYNM{Amide} | | | | | |

TABLE 7
Electrophysiology by IonWorks ® Quattro position 20
substitutions and combinations relative to SEQ ID NO: 2.

| SEQ | | | | | | | |
|---|---|---|---|---|---|---|---|
| ID | | | IC50 (μM) | | | | Nav1.4/ |
| NO. | Designation | Sequence | Nav1.7 | Nav1.5 | Nav1.4 | Nav1.3 | Nav1.7 |
| 2 | JzTx-V(1-29) | YCQKWMWTCDSKRACCE | 0.02 | 7.2 | 0.2 | 0.31 | 13 |
| | | GLRCKLWCRKII | | | | | |
| 125 | [Ser20]JzTx-V(1-29) | YCQKWMWTCDSKRACCE | 0.03 | 9.2 | 0.4 | 0.29 | 17 |
| | | GLSCKLWCRKII | | | | | |
| 122 | [Cit20]JzTx-V(1-29) | YCQKWMWTCDSKRACCE | 0.04 | 6.8 | 0.5 | 0.35 | 15 |
| | | GL[Cit]CKLWCRKII | | | | | |
| 117 | [Abu20]JzTx-V(1-29) | YCQKWMWTCDSKRACCE | 0.05 | 10.6 | 0.9 | 0.97 | 19 |
| | | GL[Abu]CKLWCRKII | | | | | |
| 121 | [Gly20]JzTx-V(1-29) | YCQKWMWTCDSKRACCE | 0.06 | 9.8 | 1.9 | 0.98 | 29 |
| | | GLGCKLWCRKII | | | | | |
| 119 | [Leu20]JzTx-V(1-29) | YCQKWMWTCDSKRACCE | 0.07 | 8.3 | 1.0 | 2.51 | 14 |
| | | GLLCKLWCRKII | | | | | |
| 118 | [Ile20]JzTx-V(1-29) | YCQKWMWTCDSKRACCE | 0.09 | 8.6 | 1.3 | 2.20 | 15 |
| | | GLICKLWCRKII | | | | | |
| 124 | [Tyr20]JzTx-V(1-29) | YCQKWMWTCDSKRACCE | 0.09 | 10.8 | 4.0 | >5.00 | 43 |
| | | GLYCKLWCRKII | | | | | |
| 115 | [Asp20]JzTx-V(1-29) | YCQKWMWTCDSKRACCE | 0.09 | 11.1 | >5.0 | >5.00 | 53 |
| | | GLDCKLWCRKII | | | | | |
| 120 | [Val20]JzTx-V(1-29) | YCQKWMWTCDSKRACCE | 0.10 | 7.1 | 3.0 | 3.37 | 31 |
| | | GLVCKLWCRKII | | | | | |
| 123 | [Nva20]JzTx-V(1-29) | YCQKWMWTCDSKRACCE | 0.17 | 10.4 | 3.1 | >5.00 | 19 |
| | | GL[Nva]CKLWCRKII | | | | | |
| 114 | [Cpa20]JzTx-V(1-29) | YCQKWMWTCDSKRACCE | 0.21 | 14.2 | >5.0 | >5.00 | 24 |
| | | GL[Cpa]CKLWCRKII | | | | | |
| 63 | [Glu20]JzTx-V(1-29) | YCQKWMWTCDSKRACCE | 0.36 | 9.8 | >5.0 | >5.00 | 14 |
| | | GLECKLWCRKII | | | | | |
| 112 | [Glu20;Trp29]JzTx-V(1-29) | YCQKWMWTCDSKRACCE | 0.03 | 6.9 | >5.0 | 3.62 | 178 |
| | | GLECKLWCRKIW | | | | | |
| 136 | [Glu20;Nva28]JzTx-V(1-29) | YCQKWMWTCDSKRACCE | 0.08 | 8.9 | >5.0 | >5.00 | 66 |
| | | GLECKLWCRK[Nva]I | | | | | |
| 133 | [Glu20;Val28]JzTx-V(1-29) | YCQKWMWTCDSKRACCE | 0.08 | 12.0 | 4.0 | 4.85 | 51 |
| | | GLECKLWCRKVI | | | | | |
| 138 | [Glu20;Ser28]JzTx-V(1-29) | YCQKWMWTCDSKRACCE | 0.08 | 13.9 | >5.0 | >5.00 | 62 |
| | | GLECKLWCRKSI | | | | | |
| 137 | [Glu20;Tyr28]JzTx-V(1-29) | YCQKWMWTCDSKRACCE | 0.09 | 8.0 | >3.5 | 2.01 | 41 |
| | | GLECKLWCRKYI | | | | | |
| 135 | [Glu20;Cit28]JzTx-V(1-29) | YCQKWMWTCDSKRACCE | 0.11 | 12.0 | >5.0 | >5.00 | 46 |
| | | GLECKLWCRK[Cit]I | | | | | |
| 136 | [Glu20;Nva28]JzTx-V(1-29) | YCQKWMWTCDSKRACCE | 0.15 | 15.8 | >5.0 | >5.00 | 34 |
| | | GLECKLWCRK[Nva]I | | | | | |
| 138 | [Glu20;Ser28]JzTx-V(1-29) | YCQKWMWTCDSKRACCE | 0.15 | 9.2 | >5.0 | >5.00 | 34 |
| | | GLECKLWCRKSI | | | | | |
| 113 | [Glu20]JzTx-V(1-29)-Trp | YCQKWMWTCDSKRACCE | 0.17 | 11.1 | >5.0 | >5.00 | 30 |
| | | GLECKLWCRKIIW | | | | | |
| 130 | [Glu20;Abu28]JzTx-V(1-29) | YCQKWMWTCDSKRACCE | 0.17 | 8.2 | >5.0 | >5.00 | 29 |
| | | GLECKLWCRK[Abu]I | | | | | |
| 130 | [Glu20;Abu28]JzTx-V(1-29) | YCQKWMWTCDSKRACCE | 0.21 | 11.1 | >5.0 | >5.00 | 24 |
| | | GLECKLWCRK[Abu]I | | | | | |
| 134 | [Glu20;Gly28]JzTx-V(1-29) | YCQKWMWTCDSKRACCE | 0.30 | 10.9 | >5.0 | >5.00 | 17 |
| | | GLECKLWCRKGI | | | | | |
| 134 | [Glu20;Gly28]JzTx-V(1-29) | YCQKWMWTCDSKRACCE | 0.37 | 11.1 | >5.0 | >5.00 | 13 |
| | | GLECKLWCRKGI | | | | | |
| 132 | [Glu20;Leu28]JzTx-V(1-29) | YCQKWMWTCDSKRACCE | 0.41 | 6.7 | >5.0 | >5.00 | 12 |
| | | GLECKLWCRKLI | | | | | |
| 111 | [Nva6;Glu20]JzTx-V(1-29) | YCQKW[Nva]WTCDSKR | 0.69 | 9.2 | >5.0 | >5.00 | 7 |
| | | ACCEGLECKLWCRKII | | | | | |
| 126 | [Glu20,28]JzTx-V(1-29) | YCQKWMWTCDSKRACCE | 0.95 | 15.8 | >5.0 | >5.00 | 5 |
| | | GLECKLWCRKEI | | | | | |
| 128 | [Glu20;Asp28]JzTx-V(1-29) | YCQKWMWTCDSKRACCE | 1.34 | 13.9 | >5.0 | >5.00 | 4 |
| | | GLECKLWCRKDI | | | | | |
| 126 | [Glu20,28]JzTx-V(1-29) | YCQKWMWTCDSKRACCE | 1.44 | 7.5 | >5.0 | >5.00 | 3 |
| | | GLECKLWCRKEI | | | | | |
| 127 | [Glu20;Cpa28]JzTx-V(1-29) | YCQKWMWTCDSKRACCE | 2.35 | 16.7 | >5.0 | >5.00 | 2 |
| | | GLECKLWCRK[Cpa]I | | | | | |

TABLE 8
Electrophysiology by IonWorks ® Quattro Position
20 substitutions relative to SEQ ID NO: 2.

| SEQ | | | | | | | |
|---|---|---|---|---|---|---|---|
| ID | | | IC50 (μM) | | | | Nav1.4/ |
| NO. | Designation | Sequence | Nav1.7 | Nav1.5 | Nav1.4 | Nav1.3 | Nav1.7 |
| 2 | JzTx-V(1-29) | YCQKWMWTCDSKRACCEG | 0.04 | >7 | 0.20 | 0.12 | 5 |
| | | LRCKLWCRKII | | | | | |
| 192 | [pl-Phe5;Glu20;Tyr28]JzTx-V(1-29) | YCQK[pl-Phe]MWTCDS | 0.11 | >5 | 3.4 | 1.3 | 30 |
| | | KRACCEGLECKLWCRKYI | | | | | |
| 193 | [Phe5;Glu20;Tyr28]JzTx-V(1-29) | YCQKFMWTCDSKRACCEG | 0.16 | >5 | >5 | >5 | |
| | | LECKLWCRKYI | | | | | |
| 193 | [Phe5;Glu20;Tyr28]JzTx-V(1-29) | YCQKFMWTCDSKRACCEG | 0.23 | >5 | >5 | >5 | |
| | | LECKLWCRKYI | | | | | |
| 194 | [Tyr5,28;Glu20]JzTx-V(1-29) | YCQKYMWTCDSKRACCEG | 0.91 | >5 | >5 | >5 | |
| | | LECKLWCRKYI | | | | | |
| 194 | [Tyr5,28;Glu20]JzTx-V(1-29) | YCQKYMWTCDSKRACCEG | 2.5 | >5 | >5 | >5 | |
| | | LECKLWCRKYI | | | | | |
| 195 | [Val5;Glu20;Tyr28]JzTx-V(1-29) | YCQKVMWTCDSKRACCEG | 3.8 | >5 | >5 | >5 | |
| | | LECKLWCRKYI | | | | | |
| 196 | [Leu5;Glu20;Tyr28]JzTx-V(1-29) | YCQKLMWTCDSKRACCEG | >5 | >5 | >5 | >5 | |
| | | LECKLWCRKYI | | | | | |
| 198 | [Nva5;Glu20;Tyr28]JzTx-V(1-29) | YCQK[Nva]MWTCDSKRA | 3.3 | >5 | >5 | >5 | |
| | | CCEGLECKLWCRKYI | | | | | |
| 199 | [Cit5;Glu20;Tyr28]JzTx-V(1-29) | YCQK[Cit]MWTCDSKRA | >5 | >5 | >5 | >5 | |
| | | CCEGLECKLWCRKYI | | | | | |
| 200 | [Lys5;Glu20;Tyr28]JzTx-V(1-29) | YCQKKMWTCDSKRACCEG | >5 | >5 | >5 | >5 | |
| | | LECKLWCRKYI | | | | | |
| 201 | [Asn5;Glu20;Tyr28]JzTx-V(1-29) | YCQKNMWTCDSKRACCEG | 4.2 | >5 | >5 | >5 | |
| | | LECKLWCRKYI | | | | | |
| 201 | [Asn5;Glu20;Tyr28]JzTx-V(1-29) | YCQKNMWTCDSKRACCEG | >5 | >5 | >5 | >5 | |
| | | LECKLWCRKYI | | | | | |
| 203 | [Glu5,20;Tyr28]JzTx-V(1-29) | YCQKEMWTCDSKRACCEG | >7 | >7 | >7 | >7 | |
| | | LECKLWCRKYI | | | | | |
| 212 | [Nva7;Glu20;Tyr28]JzTx-V(1-29) | YCQKWM[Nva]TCDSKRA | 4.5 | >7 | >7 | >7 | |
| | | CCEGLECKLWCRKYI | | | | | |
| 213 | [Cit7;Glu20;Tyr28]JzTx-V(1-29) | YCQKWM[Cit]TCDSKRA | 5.8 | >7 | >7 | >7 | |
| | | CCEGLECKLWCRKYI | | | | | |
| 214 | [Lys7;Glu20;Tyr28]JzTx-V(1-29) | YCQKWMKTCDSKRACCEG | 2.7 | >7 | >7 | >7 | |
| | | LECKLWCRKYI | | | | | |
| 215 | [Asn7;Glu20;Tyr28]JzTx-V(1-29) | YCQKWMNTCDSKRACCEG | 5.0 | >7 | 6.1 | >7 | 1 |
| | | LECKLWCRKYI | | | | | |
| 216 | [Ser7;Glu20;Tyr28]JzTx-V(1-29) | YCQKWMSTCDSKRACCEG | 4.7 | >7 | >7 | >7 | |
| | | LECKLWCRKYI | | | | | |
| 216 | [Ser7;Glu20;Tyr28]JzTx-V(1-29) | YCQKWMSTCDSKRACCEG | 6.6 | 5.4 | >7 | >7 | |
| | | LECKLWCRKYI | | | | | |
| 217 | [Glu7,20;Tyr28]JzTx-V(1-29) | YCQKWMETCDSKRACCEG | >7 | >7 | >7 | >7 | |
| | | LECKLWCRKYI | | | | | |
| 217 | [Glu7,20;Tyr28]JzTx-V(1-29) | YCQKWMETCDSKRACCEG | >7 | >7 | >7 | >7 | |
| | | LECKLWCRKYI | | | | | |
| 218 | [Glu20;1-Nal24;Tyr28]JzTx-V(1-29) | YCQKWMWTCDSKRACCEG | 0.30 | >7 | >7 | >7 | |
| | | LECKL[1-Nal]CRKYI | | | | | |
| 219 | [Glu20;2-Nal24;Tyr28]JzTx-V(1-29) | YCQKWMWTCDSKRACCEG | 0.86 | >7 | >7 | >7 | |
| | | LECKL[2-Nal]CRKYI | | | | | |
| 219 | [Glu20;2-Nal24;Tyr28]JzTx-V(1-29) | YCQKWMWTCDSKRACCEG | 1.0 | >7 | >7 | >7 | |
| | | LECKL[2-Nal]CRKYI | | | | | |
| 223 | [Glu20;Val24;Tyr28]JzTx-V(1-29) | YCQKWMWTCDSKRACCEG | >5 | >5 | >5 | >5 | |
| | | LECKLVCRKYI | | | | | |
| 224 | [Glu20;Leu24;Tyr28]JzTx-V(1-29) | YCQKWMWTCDSKRACCEG | >5 | >5 | >5 | >5 | |
| | | LECKLLCRKYI | | | | | |
| 225 | [Glu20;Nle24;Tyr28]JzTx-V(1-29) | YCQKWMWTCDSKRACCEG | >5 | >5 | >5 | >5 | |
| | | LECKL[Nle]CRKYI | | | | | |
| 226 | [Glu20;Nva24;Tyr28]JzTx-V(1-29) | YCQKWMWTCDSKRACCEG | >5 | >5 | >5 | >5 | |
| | | LECKL[Nva]CRKYI | | | | | |
| 228 | [Glu20;Lys24;Tyr28]JzTx-V(1-29) | YCQKWMWTCDSKRACCEG | 2.7 | >5 | >5 | >5 | |
| | | LECKLKCRKYI | | | | | |
| 229 | [Glu20;Asn24;Tyr28]JzTx-V(1-29) | YCQKWMWTCDSKRACCEG | >5 | >5 | >5 | >5 | |
| | | LECKLNCRKYI | | | | | |
| 232 | [Glu20;Tyr28;1-Nal29]JzTx-V(1-29) | YCQKWMWTCDSKRACCEG | 0.050 | 4.6 | 4.6 | 2.1 | 91 |
| | | LECKLWCRKY[1-Nal] | | | | | |
| 233 | [Glu20;Tyr28;2-Nal29]JzTx-V(1-29) | YCQKWMWTCDSKRACCEG | 0.044 | >5 | >5 | 2.2 | |
| | | LECKLWCRKY[2-Nal] | | | | | |
| 238 | [Glu20;Tyr28;Leu29]JzTx-V(1-29) | YCQKWMWTCDSKRACCEG | 0.084 | >5 | 4.5 | 3.0 | |
| | | LECKLWCRKYL | | | | | |
| 238 | [Glu20;Tyr28;Leu29]JzTx-V(1-29) | YCQKWMWTCDSKRACCEG | 0.23 | >5 | >5 | >5 | |
| | | LECKLWCRKYL | | | | | |
| 239 | [Glu20;Tyr28;Nle29]JzTx-V(1-29) | YCQKWMWTCDSKRACCEG | 0.079 | >5 | >5 | 4.0 | |
| | | LECKLWCRKY[Nle] | | | | | |
| 241 | [Glu20;Tyr28;Cit29]JzTx-V(1-29) | YCQKWMWTCDSKRACCEG | 1.2 | >5 | >5 | >5 | |
| | | LECKLWCRKY[Cit] | | | | | |
| 242 | [Glu20;Tyr28;Lys29]JzTx-V(1-29) | YCQKWMWTCDSKRACCEG | 0.45 | >5 | >5 | >5 | |
| | | LECKLWCRKYK | | | | | |
| 242 | [Glu20;Tyr28;Lys29]JzTx-V(1-29) | YCQKWMWTCDSKRACCEG | 0.63 | >5 | >5 | >5 | |
| | | LECKLWCRKYK | | | | | |
| 243 | [Glu20;Tyr28;Asn29]JzTx-V1-29) | YCQKWMWTCDSKRACCEG | 0.52 | >5 | >5 | >5 | |
| | | LECKLWCRKYN | | | | | |
| 244 | [Glu20;Tyr28;Ser29]JzTx-V(1-29) | YCQKWMWTCDSKRACCEG | 0.34 | >5 | >5 | >5 | |
| | | LECKLWCRKYS | | | | | |
| 245 | [Glu20,29;Tyr28]JzTx-V(1-29) | YCQKWMWTCDSKRACCEG | 4.7 | >5 | >5 | >5 | |
| | | LECKLWCRKYE | | | | | |
| 272 | [Nle6]JzTx-V(1-29) | YCQKW[Nle]WTCDSKRA | >5 | >5 | >5 | >5 | |
| | | CCEGLRCKLWCRKII | | | | | |
| 273 | [Nle6;Glu20]JzTx-V(1-29) | YCQKW[Nle]WTCDSKRA | 0.19 | >5 | >5 | 4.1 | |
| | | CCEGLECKLWCRKII | | | | | |
| 277 | [Glu1,20;Tyr28]JzTx-V(1-29) | ECQKWMWTCDSKRACCEG | 0.21 | 2.0 | >5 | >5 | |
| | | LECKLWCRKYI | | | | | |
| 278 | [Glu1;Tyr28]JzTx-V(1-29) | ECQKWMWTCDSKRACCEG | 0.046 | >5 | 0.7 | 0.3 | 16 |
| | | LRCKLWCRKYI | | | | | |
| 281 | [Glu14-Nal7]JzTx-V(1-29) | ECQKWM[1-Nal]TCDSK | 0.032 | >5 | 0.7 | 0.4 | 21 |
| | | RACCEGLRCKLWCRKII | | | | | |
| 281 | [Glu14-Nal7]JzTx-V(1-29) | ECQKWM[1-Nal]TCDSK | 0.047 | >5 | 0.5 | 0.5 | 10 |
| | | RACCEGLRCKLWCRKII | | | | | |

TABLE 9
Electrophysiology by IonWorks ® Quattro:
PEGylated JzTx-V peptide analogs.

| SEQ | | | | | | | |
|---|---|---|---|---|---|---|---|
| ID | | | IC50 (μM) | | | | Nav1.4/ |
| NO. | Designation | Sequence | Nav1.7 | Nav1.5 | Nav1.4 | Nav1.3 | Nav1.7 |
| 165 | [Atz(NPEG10)1;Glu20] | [Atz(NPEG10)]CQKWMWTCD | 0.18 | 15.1 | >5 | >5 | 28 |
| | JzTx-V(1-29) | SKRACCEGLECKLWCRKII | | | | | |
| 171 | [Atz(NPEG10)8;Glu20] | YCQKWMW[Atz(NPEG10)] | 5.00 | 18.7 | >5 | >5 | 1 |
| | JzTx-V(1-29) | CDSKRACCEGLECKLWCRKII | | | | | |
| 178 | [Atz(NPEG10)17;Glu20] | YCQKWMWTCDSKRACC[Atz | 0.18 | 15.1 | >5 | >5 | 28 |
| | JzTx-V(1-29) | (NPEG10)]GLECKLWCRKII | | | | | |
| 183 | [Glu20;Atz(NPEG10)23] | YCQKWMWTCDSKRACCEGLECK | 5.00 | 19.2 | >5 | >5 | 1 |
| | JzTx-V(1-29) | [Atz(NPEG10)]WCRKII | | | | | |
| 187 | [Glu20;Atz(NPEG10)28] | YCQKWMWTCDSKRACCEGLECKL | 1.77 | 15.4 | >5 | >5 | 3 |
| | JzTx-V(1-29) | WCRK[Atz(NPEG10)]I | | | | | |
| 188 | [Glu20;Atz(NPEG10)29] | YCQKWMWTCDSKRACCEGLECKL | 5.00 | 20.1 | >5 | >5 | 1 |
| | JzTx-V(1-29) | WCRKI[Atz(NPEG10)] | | | | | |
| 247 | Atz(NPEG10)-[Nle6] | [Atz-NPEG10]YCQKW[Nle] | 0.07 | 4.3 | 0.15 | 0.13 | 2 |
| | JzTx-V(1-29) | WTCDSKRACCEGLRCKLWCRKII | | | | | |
| 248 | [Atz(NPEG10)1;Nle6] | [Atz-NPEG10]CQKW[Nle] | 0.10 | >7 | 0.39 | 0.16 | 4 |
| | JzTx-V(1-29) | WTCDSKRACCEGLRCKLWCRKII | | | | | |
| 248 | [Atz(NPEG10)1;Nle6] | [Atz-NPEG10]CQKW[Nle] | 0.14 | >7 | 0.45 | 0.13 | 3 |
| | JzTx-V(1-29) | WTCDSKRACCEGLRCKLWCRKII | | | | | |
| 251 | [Atz(NPEG10)5;Nle6] | YCQK[Atz-NPEG10][Nle] | >7 | >7 | >7 | >7 | |
| | JzTx-V(1-29) | WTCDSKRACCEGLRCKLWCRKII | | | | | |
| 253 | [Nle6;Atz(NPEG10)7] | YCQKW[Nle][Atz-NPEG10] | 4.6 | >7 | >7 | >7 | |
| | JzTx-V(1-29) | TCDSKRACCEGLRCKLWCRKII | | | | | |
| 254 | [Nle6;Atz(NPEG10)8] | YCQKW[Nle]W[Atz-NPEG10] | 6.4 | >7 | >7 | >7 | |
| | JzTx-V(1-29) | CDSKRACCEGLRCKLWCRKII | | | | | |
| 256 | [Nle6;Atz(NPEG10)11] | YCQKW[Nle]WTCD[Atz(NPEG10)] | 0.096 | >5 | 0.4 | 0.2 | 4 |
| | JzTx-V(1-29) | KRACCEGLRCKLWCRKII | | | | | |
| 256 | [Nle6;Atz(NPEG10)11] | YCQKW[Nle]WTCD[Atz(NPEG10)] | 0.12 | >5 | 0.5 | 0.4 | 4 |
| | JzTx-V(1-29) | KRACCEGLRCKLWCRKII | | | | | |
| 264 | [Nle6;Atz(NPEG10)22] | YCQKW[Nle]WTCDSKRACCEGLRC | >7 | >7 | >7 | >7 | |
| | JzTx-V(1-29) | [Atz-NPEG10]LWCRKII | | | | | |
| 265 | [Nle6;Atz(NPEG10)23] | YCQKW[Nle]WTCDSKRACCEGLRCK | 4.8 | >7 | >7 | 5.6 | |
| | JzTx-V(1-29) | [Atz-NPEG10]WCRKII | | | | | |
| 270 | [Nle6;Atz(NPEG10)29] | YCQKW[Nle]WTCDSKRACCEGLR | 0.40 | >7 | 0.75 | 3.9 | 2 |
| | JzTx-V(1-29) | CKLWCRKI[Atz-NPEG10] | | | | | |
| 283 | [Nle6,Pra14] | YCQKW[Nle]WTCDSKR[Pra] | 0.07 | >7 | 0.09 | 0.06 | 1 |
| | JzTx-V(1-29) | CCEGLRCKLWCRKII | | | | | |

TABLE 10
Electrophysiology by IonWorks ® Quattro:
JzTx-V analogs for conjugation.

| SEQ | | | Nav1.7 |
|---|---|---|---|
| ID | | | IC50 |
| NO. | Designation | Sequence | (μM) |
| 425 | Pra-[Nle6]JzTx-V | [Pra]YCQKW[Nle]WTCD | 0.008 |
| | | SKRACCEGLRCKLWCRKII | |
| 425 | Pra-[Nle6]JzTx-V | [Pra]YCQKW[Nle]WTCD | 0.013 |
| | | SKRACCEGLRCKLWCRKII | |
| 112 | [Glu20,Trp29]JzTx-V | YCQKWMWTCDSKRACCEGL | 0.017 |
| | | ECKLWCRKIW | |
| 295 | Pra-[Glu20;Trp29] | [Pra]YCQKWMWTCDSKRA | 0.018 |
| | JzTx-V(1-29) | CCEGLECKLWCRKIW | |
| 296 | Pra-[Nle6;Trp29] | [Pra]YCQKW[Nle]WTCD | 0.019 |
| | JzTx-V(1-29) | SKRACCEGLRCKLWCRKIW | |
| 294 | [Nle6;Glu20;Trp29] | YCQKW[Nle]WTCDSKRAC | 0.024 |
| | JzTx-V(1-29) | CEGLECKLWCRKIW | |
| 294 | [Nle6;Glu20;Trp29] | YCQKW[Nle]WTCDSKRAC | 0.026 |
| | JzTx-V(1-29) | CEGLECKLWCRKIW | |
| 302 | [Nle6;Pra11;Glu20; | YCQKW[Nle]WTCD[Pra] | 0.026 |
| | Trp29]JzTx-V(1-29) | KRACCEGLECKLWCRKIW | |
| 291 | [Nle6;Lys(Pra-NPEG3) | YCQKW[Nle]WTCDSKR | 0.028 |
| | 14;Glu20;Trp29]JzTx- | [KPPG3]CCEGLECKLWC | |
| | V(1-29) | RKIW | |
| 301 | Pra-[Nle6;Glu20; | [Pra]YCQKW[Nle]WTCDS | 0.035 |
| | Phe29]JzTx-V(1-29) | KRACCEGLECKLWCRKIF | |
| 293 | [Nle6;Lys(Pra-NPEG3) | YCQKW[Nle]WTCDSKRACC | 0.041 |
| | 17;Glu20;Trp29]JzTx- | [KPPG3]GLECKLWCRKIW | |
| | V(1-29) | | |
| 290 | [Nle6;Lys(Pra-NPEG11) | YCQKW[Nle]WTCDSKR | 0.052 |
| | 14;Glu20;Trp29]JzTx- | [KPPG11]CCEGLECKLWC | |
| | V(1-29) | RKIW | |
| 322 | [Nle6;AzK17;Glu20; | YCQKW[Nle]WICDSKRACC | 0.067 |
| | Tyr28]JzTx-V(1-29) | [AzK]GLECKLWCRKYI | |
| 292 | [Nle6;Lys(Pra-NPEG11) | YCQKW[Nle]WTCDSKRACC | 0.082 |
| | 17;Glu20;Trp29]JzTx- | [KPPG11]GLECKLWCRKIW | |
| | V(1-29) | | |

TABLE 11
Electrophysiology by PatchXpress ® (PX) of single substitution and combination JzTx-V analogs.

| | | PX | PX | PX | | |
|---|---|---|---|---|---|---|
| SEQ | | hNav1.7 | hNav1.4 | hNav1.5 | | |
| ID | | Tonic IC50 | Tonic IC50 | Tonic IC50 | Nav1.4/ | Nav1.5/ |
| NO. | Designation | (μM) | (μM) | (μM) | Nav1.7 | Nav1.7 |
| 1 | JzTx-V(1-29)-FreeAcid | 0.013100 | 0.0746 | | 6 | |
| 2 | JzTx-V(1-29) | 0.001000 | 0.0030 | 2.21 | 3 | 2210 |
| 2 | JzTx-V(1-29) | 0.000200 | 0.0020 | 3.25 | 10 | 16250 |
| 2 | JzTx-V(1-29) | 0.000700 | 0.0020 | 1.60 | 3 | 2286 |
| 2 | JzTx-V(1-29) | 0.000570 | | | | |
| 48 | JzTx-45 | 0.122000 | 0.3210 | 7.46 | 3 | 61 |
| 17 | [Ala20]JzTx-V(1-29) | 0.012000 | 0.1000 | 2.75 | 8 | 229 |
| 30 | [1-Nal7]JzTx-V(1-29) | 0.000400 | 0.0009 | 1.42 | 2 | 3550 |
| 49 | [Glu1]JzTx-V(1-29) | 0.000300 | 0.0080 | 6.44 | 27 | 21467 |
| 50 | [Glu3]JzTx-V(1-29) | 0.058710 | 0.4533 | | 8 | |
| 51 | [Glu4]JzTx-V(1-29) | 0.846700 | | | | |
| 52 | [Glu5]JzTx-V(1-29) | >1.0 | 0.0031 | | | |
| 58 | [Glu12]JzTx-V(1-29) | 0.000904 | 0.0432 | | 48 | |
| 63 | [Glu20]JzTx-V(1-29) | 0.007000 | 1.2500 | 9.33 | 179 | 1333 |
| 64 | [Glu22]JzTx-V(1-29) | 0.929500 | 4.3390 | | 5 | |
| 67 | [Glu26]JzTx-V(1-29) | >1.0 | | | | |
| 68 | [Glu27]JzTx-V(1-29) | 0.012260 | 0.3240 | | 26 | |
| 69 | [Glu28]JzTx-V(1-29) | 0.001000 | 0.3000 | 8.80 | 300 | 8800 |
| 70 | [Glu29]JzTx-V(1-29) | 0.261000 | 11.3000 | >10.00 | 43 | >38 |
| 112 | [Glu20; Trp29]JzTx-V(1-29) | 0.002800 | 1.1300 | 3.42 | 404 | 1221 |
| 112 | [Glu20; Trp29]JzTx-V(1-29) | 0.000670 | 0.8240 | 3.95 | 1230 | 5896 |
| 112 | [Glu20; Trp29]JzTx-V(1-29) | 0.001300 | 1.0500 | 4.41 | 808 | 3392 |
| 112 | [Glu20; Trp29]JzTx-V(1-29) | 0.000500* | 1.3470 | 1.32 | 2694 | 2644 |
| 112 | [Glu20, Trp29]JzTx-V | 0.001411 | | | | |
| 112 | [Glu20, Trp29]JzTx-V | 0.002154 | | | | |
| 112 | [Glu20; Trp29]JzTx-V(1-29) | 0.001821 | | | | |
| 112 | [Glu20, Trp29]JzTx-V | 0.002115 | 2.3651 | 1.62 | 1118 | 767 |
| 115 | [Asp20]JzTx-V(1-29) | 0.749000 | 7.6000 | 3.20 | 10 | 4 |
| 121 | [Gly20]JzTx-V(1-29) | 0.007800 | 0.1970 | 14.10 | 25 | 1808 |
| 124 | [Tyr20]JzTx-V(1-29) | 0.005900 | 1.5700 | >10.00 | 266 | >1695 |
| 133 | [Glu20; Val28]JzTx-V(1-29) | 0.004100 | 1.3100 | 5.50 | 320 | 1341 |
| 135 | [Glu20; Cit28]JzTx-V(1-29) | 0.005600 | 6.0200 | >10.00 | 1075 | >1786 |
| 136 | [Glu20; Nva28]JzTx-V(1-29) | 0.012800 | 5.1900 | 7.82 | 405 | 611 |
| 137 | [Glu20; Tyr28]JzTx-V(1-29) | 0.000900 | 1.2700 | 11.40 | 1411 | 12667 |
| 138 | [Glu20; Ser28]JzTx-V(1-29) | 0.003300 | 4.7900 | >10.00 | 1452 | >3030 |
| 138 | [Glu20; Ser28]JzTx-V(1-29) | 0.002000 | 3.5800 | >10.00 | 1790 | >5000 |
| 138 | [Glu20; Ser28]JzTx-V(1-29) | 0.000400 | 2.9700 | 14.60 | 7425 | 36500 |
| 218 | [Glu20; 1-Nal24; Tyr28]JzTx-V(1-29) | 0.012000 | 5.2130 | 10.00 | 434 | 833 |
| 193 | [Phe5; Glu20; Tyr28]JzTx-V(1-29) | 0.004600* | 1.0000 | >1.00 | 217 | 217 |
| 232 | [Glu20; Tyr28; 1-Nal29]JzTx-V(1-29) | 0.004500* | 1.6740 | 2.16 | 372 | 480 |
| 233 | [Glu20; Tyr28; 2-Nal29]JzTx-V(1-29) | 0.004600* | 1.2190 | 1.99 | 265 | 433 |
| 238 | [Glu20; Tyr28; Leu29]JzTx-V(1-29) | 0.002600* | 0.6260 | 7.33 | 241 | 2817 |
| 239 | [Glu20; Tyr28; Nle29]JzTx-V(1-29) | 0.006200* | 0.7860 | 9.77 | 127 | >1575 |
| 277 | [Glu1, 20; Tyr28]JzTx-V(1-29) | 0.005500* | 0.9390 | >10.00 | 171 | >1818 |
| 192 | [pl-Phe5; Glu20; Tyr28]JzTx-V(1-29) | 0.002200* | 0.1720 | >1.00 | 78 | >455 |
| | N-Terminal Analogs | | | | | |
| 425 | Pra-[Nle6]JzTx-V | 0.000037 | 0.0040 | 0.97 | 109 | 26092 |
| 425 | Pra-[Nle6]JzTx-V | 0.000763 | | | | |
| 425 | Pra-[Nle6]JzTx-V(1-29) | 0.002150 | 0.0025 | 0.70 | 1 | 327 |
| 369 | Nva-[Nle6]JzTx-V(1-29) | 0.000021 | 0.0116 | 0.49 | 552 | 23418 |
| 369 | Nva-[Nle6]JzTx-V(1-29) | 0.001184 | | | | |
| 361 | Leu-[Nle6]JzTx-V(1-29) | 0.000134 | | | 0 | 0 |
| 368 | Abu-[Nle6]JzTx-V(1-29) | 0.000143 | 0.0110 | 0.48 | 77 | 3332 |
| 373 | D-Leu-[Nle6]JzTx-V(1-29) | 0.000151 | 0.0287 | 0.41 | 190 | 2704 |
| 370 | Nle-[Nle6]JzTx-V(1-29) | 0.000223 | 0.0046 | 0.83 | 21 | 3729 |
| 357 | Ala-[Nle6]JzTx-V(1-29) | 0.000307 | | | | |
| 366 | CyA-[Nle6]JzTx-V(1-29) | 0.000307 | | | | |
| 375 | Sar-[Nle6]JzTx-V(1-29) | 0.000325 | 0.0061 | 0.83 | 19 | 2541 |
| 364 | Trp-[Nle6]JzTx-V(1-29) | 0.000334 | | | | |
| 374 | D-Phe-[Nle6]JzTx-V(1-29) | 0.000351 | 0.0068 | 0.62 | 19 | 1757 |
| 365 | Tyr-[Nle6]JzTx-V(1-29) | 0.000372 | | | | |
| 362 | Pro-[Nle6]JzTx-V(1-29) | 0.000372 | | | | |
| 359 | Gly-[Nle6]JzTx-V(1-29) | 0.000384 | | | | |
| 379 | hPhe-[Nle6]JzTx-V(1-29) | 0.000476 | 0.0048 | 0.44 | 10 | 916 |
| 367 | AllylG-[Nle6]JzTx-V(1-29) | 0.000488 | | | | |
| 358 | Phe-[Nle6]JzTx-V(1-29) | 0.000493 | | | | |
| 360 | Ile-[Nle6]JzTx-V(1-29) | 0.000519 | | | | |
| 363 | Val-[Nle6]JzTx-V(1-29) | 0.000551 | | | | |
| 272 | [Nle6]JzTx-V(1-29) | 0.000586 | | | | |
| 377 | hLeu-[Nle6]JzTx-V(1-29) | 0.000676 | 0.0085 | 0.42 | 13 | 615 |
| 376 | bAla-[Nle6]JzTx-V(1-29) | 0.000951 | 0.0032 | 0.70 | 3 | 731 |
| 372 | D-Ala-[Nle6]JzTx-V(1-29) | 0.000957 | 0.0051 | 0.73 | 5 | 764 |
| 462 | Leu-[Nle6; Lys17; Glu28]JzTx-V(1-29) | 0.017410 | 0.3553 | | 20 | |
| 464 | D-Leu-[Nle6; Lys17; Glu28]JzTx-V(1- | 0.024090 | 0.4336 | | 18 | |
| | 29) | | | | | |
| 466 | NMeLeu-[Nle6; Lys17; Glu28]JzTx- | 0.020050 | 0.3900 | | 19 | |
| | V(1-29) | | | | | |
| 468 | 1-Ach-[Nle6; Lys17; Glu28]JzTx-V(1- | 0.009057 | 0.3668 | | 40 | |
| | 29) | | | | | |
| 470 | Leu-Nva-[Nle6; Lys14; Glu28]JzTx- | 0.013510 | 0.4561 | 5.03 | 34 | 372 |
| | V(1-29) | | | | | |
| 471 | Leu-Nva-[Nle6; Lys17; Glu28]JzTx- | 0.029630 | 0.1904 | 3.27 | 6 | 110 |
| | V(1-29) | | | | | |
| 472 | D-Leu-Nva-[Nle6; Lys14; Glu28]JzTx- | 0.014260 | 0.6039 | 4.98 | 42 | 349 |
| | V(1-29) | | | | | |
| 473 | D-Leu-Nva-[Nle6; Lys17; Glu28]JzTx- | 0.012530 | 0.4289 | 2.26 | 34 | 180 |
| | V(1-29) | | | | | |
| | Positional Analogs | | | | | |
| 566 | CyA-[Nle6; Glu28]JzTx-V(1-29) | 0.007015 | 0.7195 | | 103 | |
| 545 | CyA-[Nle6; Lys20]JzTx-V(1-29) | 0.074470 | | | | |
| 457 | Lys-[Nle6; Glu28]JzTx-V(1-29) | >1.0 | >10.0 | >10.0 | | |
| 458 | Lys-[Nle6; Glu28; Trp29]JzTx-V(1-29) | 0.008157 | 0.3086 | 1.65 | 38 | 202 |
| 563 | CyA-[Lys1; Nle6; Glu28]JzTx-V(1-29) | 0.005403 | 0.6816 | | 126 | |
| 565 | CyA-[Nle6; Lys11; Glu28]JzTx-V(1- | 0.010010 | 0.7510 | | 75 | |
| | 29) | | | | | |
| 455 | CyA-[Nle6; Lys14; Glu28]JzTx-V(1- | 0.006351 | 0.5450 | 6.99 | 86 | 1101 |
| | 29) | | | | | |
| 456 | CyA-[Nle6; Lys17; Glu28]JzTx-V(1- | 0.004829 | 0.3266 | 4.67 | 68 | 967 |
| | 29) | | | | | |
| 459 | CyA-[Nle6; Lys17; Glu28; Trp29]JzTx- | 0.009077 | 0.2470 | | 27 | |
| | V(1-29) | | | | | |
| 547 | CyA-[Nle6; Val8; Lys17; Glu28]JzTx- | 0.026570 | | | | |
| | V(1-29) | | | | | |
| 549 | CyA-[Leu3; Nle6; Lys17; Glu28]JzTx- | >1.0 | >10.0 | | | |
| | V(1-29) | | | | | |
| 551 | CyA-[Phe1; Nle6; Lys17; Glu28]JzTx- | 0.020810 | 0.2679 | | 13 | |
| | V(1-29) | | | | | |
| 555 | CyA-[Nle6, 22; Lys17; Glu28]JzTx-V(1- | >1.0 | 7.2580 | | | |
| | 29) | | | | | |
| 557 | CyA-[Nle6, 27; Lys17; Glu28]JzTx-V(1- | 0.017010 | | | | |
| | 29) | | | | | |
| 561 | CyA-[Nle6, 12; Lys17; Glu28]JzTx-V(1- | 0.011310 | 0.3699 | | 33 | |
| | 29) | | | | | |
| 476 | CyA-[Nle6; Lys20; Trp29]JzTx-V(1- | 0.130600 | 1.6360 | 9.32 | 13 | 71 |
| | 29) | | | | | |
| 708 | Glu-[ Nle6; Glu28]JzTx-V(1-29) | 0.000765 | 0.0992 | 7.60 | 130 | 9941 |

* = at high concentrations, compound would wash off slowly or not at all.

TABLE 12
Electrophysiology by PatchXpress ® (PX) of JzTx-V analogs for conjugation.

| | | PX | PX | PX | | |
|---|---|---|---|---|---|---|
| SEQ | | hNav1.7 | hNav1.4 | hNav1.5 | | |
| ID | | Tonic IC50 | Tonic IC50 | Tonic IC50 | Nav1.4/ | Nav1.5/ |
| NO. | Designation | (μM) | (μM) | (μM) | Nav1.7 | Nav1.7 |
| | Pra-containing [Glu20, Trp29]JzTx-V analogs | | | | | |
| 298 | Pra-[Phe6; Glu20; Trp29]JzTx-V(1-29) | 0.014987 | 0.6611 | 0.78 | 44 | 52 |
| 299 | Pra-[Leu6; Glu20; Trp29]JzTx-V(1-29) | 0.000571 | 1.1824 | 1.33 | 2069 | 2332 |
| 300 | Pra-[Nva6; Glu20; Trp29]JzTx-V(1-29) | 0.000818 | 0.9675 | 5.30 | 1183 | 6483 |
| 290 | [Nle6; Lys(Pra-NPEG11)14; Glu20; Trp29]JzTx-V(1-29) | 0.520000 | 2.7289 | 6.10 | 5 | 12 |
| 291 | [Nle6; Lys(Pra-NPEG3)14; Glu20; Trp29]JzTx-V(1-29) | 0.030000 | 1.1302 | 3.01 | 38 | 100 |
| 292 | [Nle6; Lys(Pra-NPEG11)17; Glu20; Trp29]JzTx-V(1-29) | 0.900000 | 1.6280 | 3.12 | 2 | 3 |
| 293 | [Nle6; Lys(Pra-NPEG3)17; Glu20; Trp29]JzTx-V(1-29) | 0.570000 | 0.4531 | 0.58 | 1 | 1 |
| 437 | Nva-[Nle6; Lys(Pra)14; Glu20, Trp29]JzTx-V(1-29) | 0.009594 | | | | |
| 441 | Nva-[Leu6; Lys(Pra)14; Glu20; Trp29]JzTx-V(1-29) | 0.010355 | | | | |
| | AzK-containing [Glu20, Trp29]JzTx-V analogs | | | | | |
| 304 | [AzK1; Nle6; Glu20; Trp29]JzTx-V(1-29) | 0.003864 | 1.7362 | 2.56 | 449 | 662 |
| 305 | [Nle6; AzK11; Glu20; Trp29]JzTx-V(1-29) | 0.435437 | | | 0 | 0 |
| 306 | [Nle6; AzK14; Glu20; Trp29]JzTx-V(1-29) | 0.001153 | 0.6347 | 1.97 | 550 | 1712 |
| 307 | [Nle6; AzK17; Glu20; Trp29]JzTx-V(1-29) | 0.009085 | 0.3596 | 0.75 | 40 | 83 |
| | Aha-containing [Glu20, Trp29]JzTx-V analogs | | | | | |
| 308 | Aha-[Nle6; Glu20; Trp29]JzTx-V(1-29) | 0.001124 | 1.1997 | 3.77 | 1068 | 3351 |
| 309 | [Aha1; Nle6; Glu20; Trp29]JzTx-V(1-29) | 0.003207 | 0.7673 | 2.03 | 239 | 634 |
| | Pra-containing [Glu28]JzTx-V analogs | | | | | |
| 328 | Pra-[Nle6; Glu28]JzTx-V(1-29) | 0.000515 | 0.1302 | 3.02 | 253 | 5854 |
| 329 | [Pra1; Nle6; Glu28]JzTx-V(1-29) | 0.000269 | 0.1495 | 4.62 | 555 | 17167 |
| 330 | [Nle6; Pra11; Glu28]JzTx-V(1-29) | 0.000763 | 0.2216 | 5.98 | 291 | 7841 |
| 331 | [Nle6; Pra14; Glu28]JzTx-V(1-29) | 0.000493 | 0.1050 | 3.51 | 213 | 7119 |
| 332 | [Nle6; Pra17; Glu28]JzTx-V(1-29) | 0.003632 | 0.1252 | 3.08 | 34 | 849 |
| 392 | CyA-[Nle6, Lys(Pra)14, Glu28]JzTx-V(1-29) | >0.1 | | | | |
| 392 | CyA-[Nle6, Lys(Pra)14, Glu28]JzTx-V(1-29) | 0.000226 | 0.0861 | | 381 | |
| 392 | CyA-[Nle6, Lys(Pra)14, Glu28]JzTx-V(1-29) | 0.000299 | | | | |
| 392 | CyA-[Nle6, Lys(Pra)14, Glu28]JzTx-V(1-29) | 0.001402 | 0.1082 | 0.92 | 77 | 659 |
| 392 | CyA-[Nle6, Lys(Pra)14, Glu28]JzTx-V(1-29) | 0.002360 | 0.1095 | 1.45 | 46 | 615 |
| 392 | CyA-[Nle6, Lys(Pra)14, Glu28]JzTx-V(1-29) | 0.002573 | 0.1236 | 2.16 | 48 | 841 |
| 395 | CyA-[Nle6, Pra17, Glu28]JzTx-V(1-29) | 0.000144 | 0.0625 | | 434 | |
| 395 | CyA-[Nle6, Pra17, Glu28]JzTx-V(1-29) | 0.002786 | 0.2117 | 0.71 | 76 | 256 |
| 435 | Nva-[Nle6; Lys(Pra)14; Glu28]JzTx-V(1-29) | 0.002189 | 0.2174 | | 99 | |
| 439 | Nva-[Leu6; Lys(Pra)14; Glu28]JzTx-V(1-29) | 0.001038 | 0.2934 | | 283 | |
| 439 | Nva-[Leu6; Lys(Pra)14; Glu28]JzTx-V(1-29) | 0.001374 | | | | |
| 439 | Nva-[Leu6; Lys(Pra)14; Glu28]JzTx-V(1-29) | 0.000384 | 0.2997 | | 781 | |
| 439 | Nva-[Leu6; Lys(Pra)14; Glu28]JzTx-V(1-29) | 0.000612 | | | | |
| 442 | Nva-[Leu6, Lys(Pra-NPEG3)14; Glu28]JzTx-V(1-29) | 0.004616 | 0.4514 | 3.96 | 98 | 857 |
| 449 | CyA-[Leu6, Lys(Pra)14, Glu28]JzTx-V(1-29) | 0.001496 | 0.1656 | 1.55 | 111 | 1038 |
| 520 | CyA-[Nle6; Pra11; Glu28]JzTx-V(1-29) | 0.000193 | 0.5170 | | 2673 | |
| 521 | CyA-[Nle6; Pra12; Glu28]JzTx-V(1-29) | 0.001476 | 0.0921 | | 62 | |
| 879 | [Nle6; Pra12; Glu28]JzTx-V(1-29) | 0.001354 | | | | |
| 686 | Pra-[Nle6; Phe20; Glu28]JzTx-V(1-29) | 0.010280 | | | | |
| 703 | Pra-[Nle6; Ala19; Glu28]JzTx-V(1-29) | >1.0 | | | | |
| 704 | Pra-[Nle6; Lys19; Glu28]JzTx-V(1-29) | >1.0 | | | | |
| 705 | Pra-[Nle6; Arg19; Glu28]JzTx-V(1-29) | >1.0 | | | | |
| 718 | Pra-[Nle6; Lys17; Glu28]JzTx-V(1-29) | 0.001422 | 0.0339 | | 24 | |
| 728 | Pra-[Nle6; Glu12, 28; Lys17]JzTx-V(1-29) | 0.008758 | 0.4049 | | 46 | |
| 721 | Pra-[Nle6; Lys20; Glu28]JzTx-V(1-29) | 0.000519 | 0.1852 | | 357 | |
| 838 | Pra-[SeC2, 16; Nle6; Glu28]JzTx-V(1-29) | 0.000949 | 0.0581 | | 61 | |
| | Acidic Substitution Analogs | | | | | |
| 707 | Glu-Pra-[Nle6; Glu28]JzTx-V(1-29) | 0.000738 | 0.1119 | | 152 | |
| 709 | Pra-[Glu1, 28; Nle6]JzTx-V(1-29) | 0.001127 | 0.1851 | >1.0 | 164 | >887 |
| 712 | Pra-[Nle6; Glu8, 28]JzTx-V(1-29) | 0.016370 | 1.5820 | | 97 | |
| 714 | Pra-[Nle6; Glu11, 28]JzTx-V(1-29) | 0.001577 | 0.3808 | >10.0 | 241 | >6341 |
| 715 | Pra-[Nle6; Glu12, 28]JzTx-V(1-29) | 0.001726 | 0.8112 | >10.0 | 470 | >5794 |
| 717 | Pra-[Nle6; Glu14, 28]JzTx-V(1-29) | 0.000975 | 0.3252 | | 333 | |
| 719 | Pra-[Nle6; Glu18, 28]JzTx-V(1-29) | >1.0 | | | | |
| 720 | Pra-[Nle6; Glu19, 28]JzTx-V(1-29) | >1.0 | | | | |
| 722 | Pra-[Nle6; Glu22, 28]JzTx-V(1-29) | 0.022620 | >10.0 | | >442 | |
| 725 | Pra-[Nle6; Glu27, 28]JzTx-V(1-29) | >10.0 | | | | |
| 726 | Pra-[Nle6; Glu28]JzTx-V(1-29)-Glu | 0.032440 | | | | |
| 732 | CyA-[Nle6; Glu12, 28; Pra17]JzTx-V(1-29) | 0.000870 | 0.2528 | | 291 | |
| 733 | CyA-[Nle6; Glu14, 28; Pra17]JzTx-V(1-29) | 0.001189 | 0.1295 | | 109 | |
| 734 | Glu-Pra-[Nle6; Glu11, 28]JzTx-V(1-29) | 0.002329 | 1.0530 | | 452 | |
| 736 | Glu-[Pra1; Nle6; Glu11, 28]JzTx-V(1-29) | 0.001459 | 0.5468 | | 375 | |
| 738 | Glu-[Pra1; Nle6; Glu14, 28]JzTx-V(1-29) | 0.000563 | 0.2464 | | 437 | |
| 739 | Pra-[Glu1, 11, 28; Nle6]JzTx-V(1-29) | 0.005547 | 1.2790 | | 231 | |
| 741 | Glu-Pra-[Glu1, 11, 28; Nle6]JzTx-V(1-29) | 0.005587 | 1.6850 | | 302 | |
| 742 | Pra-[Glu1, 12, 28; Nle6]JzTx-V(1-29) | 0.004139 | 1.7200 | | 416 | |
| 743 | Pra-[Glu1, 14, 28; Nle6]JzTx-V(1-29) | 0.001356 | 0.6700 | | 494 | |
| 744 | Pra-[Nle6; Glu11, 12, 28]JzTx-V(1-29) | 0.003803 | 1.4220 | | 374 | |
| 748 | Glu-[Pra1; Nle6; Glu11, 12, 28]JzTx-V(1-29) | 0.006657 | 2.1510 | | 323 | |
| 750 | Glu-[Pra1; Nle6; Glu11, 14, 28]JzTx-V(1-29) | 0.002905 | 1.1940 | | 411 | |
| 751 | Pra-[Glu1, 11, 14, 28; Nle6]JzTx-V(1-29) | 0.010180 | 1.9240 | | 189 | |
| 756 | CyA-[Glu1, 12, 14, 28; Nle6; Pra17]JzTx-V(1-29) | >1.0 | | | | |
| 757 | CyA-[Glu1, 11, 12, 14, 28; Nle6; Pra17]JzTx-V(1-29) | >1.0 | | | | |
| 828 | Pra-[Nle6; Glu28]JzTx-V(1-29)-Gly-Free Acid | 0.008344 | 1.7610 | | 211 | |
| 772 | Glu-Nva-[Glu1, 11, 28; Nle6; Pra17]JzTx-V(1-29) | 0.015160 | | | | |
| 866 | CyA-[Glu1, 28; Nle6; Pra17; Cha29]JzTx-V(1-29) | 0.000321 | 0.0376 | | 117 | |
| 869 | CyA-[Glu1, 11, 28; Nle6; Pra17; Cha29]JzTx-V(1-29) | 0.00095 | 0.2943 | | 311 | |
| 1244 | CyA-[Nle6; Glu11; Pra17; 5-BrW24]JzTx-V(1-29) | 0.00064 | 0.0074 | | 12 | |
| 1672 | [CyA1; Nle6; Glu11, 28; Pra17]JzTx-V(1-29) | 0.00287 | 0.4567 | | 159 | |
| | Neutral Substitution Analogs | | | | | |
| 727 | Pra-[Nle6; Ala20; Glu28]JzTx-V(1-29) | 0.904600 | | | | |
| 795 | Pra-[Nle6; Cit20; Glu28]JzTx-V(1-29) | >1.0 | | | | |
| 799 | Pra-[Nle6; Cit20, 26; Glu28]JzTx-V(1-29) | 0.003697 | 0.3429 | | 93 | |
| 804 | Pra-[Nle6; Gln22; Glu28]JzTx-V(1-29) | 0.035330 | | | | |
| 807 | Pra-[Gln4; Nle6; Cit13; Glu28]JzTx-V(1-29) | 0.020930 | | | | |
| 1680 | [CyA1; Nle6; Pra17; Gln22; Glu28]JzTx-V(1-29) | 0.04764 | | | | |
| 1688 | [Pra1; Nle6; Val20; Glu28]JzTx-V(1-29) | 0.00399 | 1.1178 | | 280 | |
| | Hydrophobic Substitutions | | | | | |
| 841 | Pra-[1-Nal5; Nle6; Glu28]JzTx-V(1-29) | 0.070900 | | | | |
| 842 | Pra-[2-Nal5; Nle6; Glu28]JzTx-V(1-29) | 0.021650 | | | | |
| 844 | Pra-[hPhe5; Nle6; Glu28]JzTx-V(1-29) | 0.000599 | 0.2584 | | 431 | |
| 845 | Pra-[5-BrW5; Nle6; Glu28]JzTx-V(1-29) | 0.053520 | | | | |
| 863 | Pra-[Phe6; Glu28]JzTx-V(1-29) | 0.001360 | 0.0616 | | 45 | |
| 846 | Pra-[Nle6; 1-Nal7; Glu28]JzTx-V(1-29) | 0.825000 | | | | |
| 847 | Pra-[Nle6; 2-Nal7; Glu28]JzTx-V(1-29) | 0.470500 | | | | |
| 848 | Pra-[Nle6; Phe7; Glu28]JzTx-V(1-29) | 0.012640 | 1.0090 | | 80 | |
| 849 | Pra-[Nle6; hPhe7; Glu28]JzTx-V(1-29) | >1.0 | | | | |
| 850 | Pra-[Nle6; 5-BrW7; Glu28]JzTx-V(1-29) | 0.539600 | | | | |
| 855 | Pra-[Nle6; Ile23; Glu28]JzTx-V(1-29) | 0.001061 | 0.1934 | | 182 | |
| 856 | Pra-[Nle6, 23; Glu28]JzTx-V(1-29) | 0.001721 | 0.1021 | | 59 | |
| 857 | Pra-[Nle6; Nva23; Glu28]JzTx-V(1-29) | 0.003028 | | | | |
| 859 | Pra-[Nle6; Chg23; Glu28]JzTx-V(1-29) | 0.000489 | 0.1766 | | 361 | |
| 860 | Pra-[Nle6; Cha23; Glu28]JzTx-V(1-29) | 0.001614 | 0.1173 | | 73 | |
| 851 | Pra-[Nle6; 1-Nal24; Glu28]JzTx-V(1-29) | 0.031980 | | | | |
| 852 | Pra-[Nle6; 2-Nal24; Glu28]JzTx-V(1-29) | 0.182100 | | | | |
| 853 | Pra-[Nle6; Phe24; Glu28]JzTx-V(1-29) | 0.015290 | | | | |
| 854 | Pra-[Nle6; hPhe24; Glu28]JzTx-V(1-29) | >1.0 | | | | |
| 858 | Pra-[Nle6; 5-BrW24; Glu28]JzTx-V(1-29) | 0.000039 | 0.0404 | | 1036 | |
| 861 | Pra-[Nle6; Glu28; Phe29]JzTx-V(1-29) | 0.000388 | 0.3042 | | 785 | |
| 450 | Pra-[Nle6; Glu28; Trp29]JzTx-V(1-29) | 0.000782 | 0.0367 | | 47 | |
| 862 | Pra-[Nle6; Glu28; Cha29]JzTx-V(1-29) | 0.000593 | 0.0366 | | 62 | |
| 873 | CyA-[Nle6; Pra17; 6-BrW24; Glu28]JzTx-V(1-29) | 0.008471 | | | | |
| 874 | CyA-[Nle6; Pra17; 6-MeW24; Glu28]JzTx-V(1-29) | 0.014029 | | | | |
| 875 | CyA-[Nle6; Pra17; 7-BrW24; Glu28]JzTx-V(1-29) | 0.025289 | | | | |
| 876 | CyA-[Nle6; Pra17; Glu28; Phe29]JzTx-V(1-29) | 0.00109 | 0.0721 | | 66 | |
| 452 | CyA-[Nle6; Pra17; Glu28; Trp29]JzTx-V(1-29) | 0.00251 | 0.0646 | | 26 | |
| 877 | CyA-[Nle6; Pra17; Glu28; hPhe29]JzTx-V(1-29) | 0.00016 | 0.0149 | | 93 | |
| 1603 | Pra-[4-BrhE5; Nle6; Glu28]JzTx-V(1-29) | 0.00023 | 0.0479 | | 207 | |
| 1662 | CyA-[Nle6; Pra17; 5-MeW24; Glu28]JzTx-V(1-29) | 0.00052 | 0.0898 | | 172 | |
| 871 | Pra-[Nle6; 5-BrW24]JzTx-V(1-29) | 0.00166 | 0.0110 | | 7 | |
| 872 | CyA-[Nle6; Pra17; 5-BrW24]JzTx-V(1-29) | 0.00109 | 0.0036 | | 3 | |
| | Pra-containing [Glu20]JzTx-V analogs | | | | | |
| 297 | Pra-[Nle6; Glu20]JzTx-V(1-29) | 0.001867 | 0.8040 | 1.20 | 431 | 642 |
| 343 | [Pra1; Nle6; Glu20]JzTx-V(1-29) | 0.002633 | 0.7902 | 2.66 | 300 | 1011 |
| 344 | [Nle6; Pra11; Glu20]JzTx-V(1-29) | 0.018359 | 4.2172 | 3.55 | 230 | 193 |
| 345 | [Nle6; Pra14; Glu20]JzTx-V(1-29) | 0.007162 | 1.6607 | 4.57 | 232 | 638 |
| 346 | [Nle6; Pra17; Glu20]JzTx-V(1-29) | 0.009953 | 0.2906 | 1.02 | 29 | 102 |
| 393 | CyA-[Nle6, Lys(Pra)14, Glu20]JzTx-V(1-29) | >0.1 | >10 | | | |
| 396 | CyA-[Nle6, Pra17, Glu20]JzTx-V(1-29) | 0.002837 | 0.2779 | | 98 | |
| | Pra-containing [Glu20, Tyr28]JzTx-V analogs | | | | | |
| 313 | Pra-[Nle6; Glu20; Tyr28]JzTx-V(1-29) | 0.000427 | 0.9659 | 4.37 | 2261 | 10226 |
| 315 | [Nle6; Pra11; Glu20; Tyr28]JzTx-V(1-29) | 0.001284 | 0.8251 | 2.46 | 643 | 1914 |
| 316 | [Nle6; Pra14; Glu20; Tyr28]JzTx-V(1-29) | 0.001759 | 0.7069 | 3.69 | 402 | 2099 |
| 317 | [Nle6; Pra17; Glu20; Tyr28]JzTx-V(1-29) | 0.003802 | 0.6137 | 3.52 | 161 | 927 |
| 394 | CyA-[Nle6, Lys(Pra)14, Glu20, Tyr28]JzTx-V(1-29) | 0.000050 | 0.9641 | | 19130 | |
| 397 | CyA-[Nle6, Pra17, Glu20, Tyr28]JzTx-V(1-29) | 0.087101 | 1.7601 | | 20 | |
| 436 | Nva-[Nle6; Lys(Pra)14; Glu20; Tyr28]JzTx-V(1-29) | 0.002961 | | | | |
| 440 | Nva-[Leu6; Lys(Pra)14; Glu20; Tyr28]JzTx-V(1-29) | 0.001953 | | | | |
| | Pra-containing JzTx-V analogs | | | | | |
| 283 | [Nle6, Pra14]JzTx-V(1-29) | 0.000300* | 0.0050* | 0.63 | 17 | 2090 |
| 380 | CyA-[Nle6, Lys(Pra-NPEG3)14]JzTx-V(1-29) | 0.000885 | | | 0 | 0 |
| 380 | CyA-[Nle6, Lys(Pra-NPEG3)14]JzTx-V(1-29) | 0.000845 | | | | |
| 385 | CyA-[Nle6, Lys(Pra-NPEG3)17]JzTx-V(1-29) | 0.003636 | | | 0 | 0 |
| 431 | Nva-[Nle6, Lys(Pra)14]JzTx-V(1-29) | 0.001621 | 0.0205 | | 13 | |
| 431 | Nva-[Nle6, Lys(Pra)14]JzTx-V(1-29) | 0.001629 | | | | |
| 432 | Nva-[Nle6, Lys(Pra-NPEG3)14]JzTx-V(1-29) | 0.001432 | 0.0165 | | 12 | |
| 432 | Nva-[Nle6, Lys(Pra-NPEG3)14]JzTx-V(1-29) | 0.001556 | | | | |
| 438 | Nva-[Leu6, Lys(Pra)14]JzTx-V | 0.002379 | 0.0161 | | 7 | |
| 438 | Nva-[Leu6, Lys(Pra)14]JzTx-V | 0.001567 | | | | |
| 651 | Pra-[Nle6; Gly28]JzTx-V(1-29) | 0.003137 | | | | |
| 652 | Pra-[Nle6; His28]JzTx-V(1-29) | 0.000371 | | | | |
| 655 | Pra-[Nle6; Leu28]JzTx-V(1-29) | 0.002912 | 0.0259 | | 9 | |
| 657 | Pra-[Nle6; Pro28]JzTx-V(1-29) | 0.001969 | 0.2058 | | 105 | |
| 664 | Pra-[Nle6, 28]JzTx-V(1-29) | 0.000339 | | | | |
| 665 | Pra-[Nle6; Gln28]JzTx | 0.000912 | 0.0107 | 3.22 | 12 | 3529 |
| 682 | Pra-[Nle6; Tyr20]JzTx-V(1-29) | 0.005977 | | | | |
| 729 | Pra-[Nle6; Glu12; Lys17]JzTx-V(1-29) | 0.001872 | 0.0076 | | 4 | |
| 723 | Pra-[Nle6; Asp28]JzTx-V(1-29) | 0.005976 | 0.0784 | | 13 | |
| 730 | Pra-[Nle6; Glu12]JzTx-V(1-29) | 0.001189 | 0.0372 | | 31 | |
| 296 | Pra-[Nle6; Trp29]JzTx-V(1-29) | 0.004787 | 0.0370 | 2.29 | 8 | 479 |

* = at high concentrations, compound would wash off slowly or not at all.

TABLE 13
Electrophysiology by PatchXpress ® (PX) of JzTx-V peptide analogs with linkers.

| | | PX | PX | PX | | |
|---|---|---|---|---|---|---|
| SEQ | | hNav1.7 | hNav1.4 | hNav1.5 | | |
| ID | | Tonic IC50 | Tonic IC50 | Tonic IC50 | | |
| NO. | Designation | (μM) | (μM) | (μM) | Nav1.4/Nav1.7 | Nav1.5/Nav1.7 |
| 247 | Atz(NPEG10)-[Nle6]JzTx-V(1-29) | 0.006000* | 0.0080* | 3.77 | 1 | 629 |
| 248 | [Atz(NPEG10)1; Nle6]JzTx-V(1-29) | 0.001000* | 0.0150* | 0.95 | 15 | 946 |
| 256 | [Nle6; Atz(NPEG10)11]JzTx-V(1-29) | 0.009300* | 0.0270* | 1.86* | 3 | 200 |
| 270 | [Nle6; Atz(NPEG10)29]JzTx-V(1-29) | 0.022000 | | | | |
| 406 | [Nle6; Atz(NPEG10)17; Glu28]JzTx-V(1-29) | 0.005881 | 0.0659 | | 11 | |
| 407 | [Atz(NPEG10)1; Nle6; Glu20]JzTx-V(1-29) | 0.006480 | 0.5487 | | 85 | |
| 410 | CyA-[Nle6, Lys(Atz(NPEG10)-NPEG3)14]JzTx-V(1-29) | 0.006365 | 0.0166 | | 3 | |
| 433 | Nva-[Nle6, Lys(Atz(NPEG10))14]JzTx-V(1-29) | 0.004407 | 0.0148 | 1.27 | 6 | 288 |
| 434 | Nva-[Nle6, Lys(Atz(NPEG10)-NPEG4)14]JzTx-V(1-29) | 0.009670 | 0.0513 | 0.95 | 8 | 98 |
| 443 | CyA-[Nle6, Atz(NPEG10)17, Glu28]JzTx-V(1-29) | 0.005625 | 0.1724 | 1.33 | 31 | 236 |
| 444 | CyA-[Nle6, Lys(Atz(NPEG10))14, Glu28]JzTx-V(1-29) | 0.005258 | 0.3834 | | 73 | |
| 445 | CyA-[Nle6, Lys(Atz(NPEG10))14, Glu20, Tyr28]JzTx-V(1-29) | 0.007112 | 1.2747 | | 179 | |
| 446 | Nva-[Leu6; Lys(Atz(NPEG10))14]JzTx-V(1-29) | 0.011649 | 0.1275 | 2.41 | 11 | 207 |
| 447 | Nva-[Leu6, Lys(Atz(NPEG10))14; Glu28]JzTx-V | 0.009001 | 0.4131 | 4.70 | 46 | 522 |
| 448 | Nva-[Nle6; Lys(Atz(NPEG10))14; Glu28]JzTx-V(1-29) | 0.018442 | 0.4433 | 4.18 | 24 | 227 |
| 427 | Atz(PEG11-benzylthioacetamide)-[Nle6DzTx-V(1-29) | 0.001400* | 0.0130* | 1.98* | 9 | 1416 |
| 883 | Atz(NPEG10)-[Nle6; Glu28]JzTx-V(1-29) | 0.003084 | 0.3714 | | 120 | |
| 886 | Atz(NPEG23)-[Nle6]JzTx-V(1-29) | 0.003091 | | | | |
| 891 | CyA-[Nle6, Lys(Atz(NPEG10))14, Glu28]JzTx-V(1-29) | 0.006093 | 0.4018 | 3.99 | 66 | 655 |
| 895 | CyA-[Nle6, Atz(palmitate)17, Glu28]JzTx-V(1-29) | 0.260400 | | | | |
| 896 | CyA-[Nle6, Atz(GGGGS-SA21-amide)17, Glu28]JzTx-V(1-29) | 0.298600 | | | | |
| 897 | CyA-[Nle6, Atz(His tag)17, Glu28]JzTx-V(1-29) | 0.034300 | | | | |
| 898 | Atz(Biotin)-[Nle6]JzTx-V(1-29) | 0.002483 | 0.0155 | 5.13 | 6 | 2067 |
| — | Homodimeric Conjugate No. 2 (see, Example 5) | 0.000200* | 0.0010* | 0.72* | 5 | 3595 |
| — | Homodimeric Conjugate No. 2 (see, Example 5) | 0.005920 | 0.0169 | 1.18 | 3 | 199 |
| — | Homodimeric Conjugate No. 6 (see, Example 5) | 0.000414 | | | | |
| — | Homodimeric Conjugate No. 7 (see, Example 5) | 0.002121 | 0.2004 | | 94 | |
| — | Homodimeric Conjugate No. 8 (see, Example 5) | 0.000679 | 0.0526 | 1.53 | 77 | 2246 |
| — | Homodimeric Conjugate No. 9 (see, Example 5) | 0.001319 | 0.1184 | 1.69 | 90 | 1283 |
| — | Immunoglobulin Peptide Conjugate 1 (see, Example 9, Table | 0.002900 | 0.0024 | | | |
| | 21) | | | | | |
| — | Immunoglobulin Peptide Conjugate 1 (see, Example 9, Table | 0.0023 | 0.0052 | 0.623 | 2 | 0.623 |
| | 21) | | | | | |
| — | Immunoglobulin Peptide Conjugate 2 (see, Example 9, Table | 0.001 | 0.1153 | | 115 | |
| | 21) | | | | | |
| — | Immunoglobulin Peptide Conjugate 3 (see, Example 9, Table | 0.0023 | 0.076 | 2.69 | 33 | 2.69 |
| | 21) | | | | | |
| — | Immunoglobulin Peptide Conjugate 4 (see, Example 9, Table | 0.002 | 0.0724 | | 36 | |
| | 21) | | | | | |
| — | Immunoglobulin Peptide Conjugate 5 (see, Example 9, Table | 0.0078 | 0.166 | | 21 | |
| | 21) | | | | | |
| — | Immunoglobulin Peptide Conjugate 6 (see, Example 9, Table | 0.041 | | | 0 | |
| | 21) | | | | | |
| — | Immunoglobulin Peptide Conjugate 7 (see, Example 9, Table | 0.0746 | 0.62 | 4.07 | 8 | 4.07 |
| | 21) | | | | | |
| — | Immunoglobulin Peptide Conjugate 8 (see, Example 9, Table | 0.075 | 0.948 | | 13 | |
| | 21) | | | | | |
| — | Immunoglobulin Peptide Conjugate 9 (see, Example 9, Table | 0.0397 | 0.112 | 9.82 | 3 | 9.82 |
| | 21) | | | | | |
| — | Immunoglobulin Peptide Conjugate 10 (see, Example 9, | 0.046 | 0.344 | >10 | 7 | >10 |
| | Table 21) | | | | | |
| — | Immunoglobulin Peptide Conjugate 11 (see, Example 9, | 0.045 | | | | |
| | Table 21) | | | | | |
| — | Immunoglobulin Peptide Conjugate 12 (see, Example 9, | 0.003 | 0.1271 | | 42 | |
| | Table 21) | | | | | |
| — | Immunoglobulin Peptide Conjugate 13 (see, Example 9, | 0.01 | | | | |
| | Table 21) | | | | | |
| — | Immunoglobulin Peptide Conjugate 14 (see, Example 9, | 0.0017 | 0.0984 | | 58 | |
| | Table 21) | | | | | |
| — | Immunoglobulin Peptide Conjugate 15 (see, Example 9, | 0.125 | | | | |
| | Table 21) | | | | | |
| — | Immunoglobulin Peptide Conjugate 16 (see, Example 9, | 0.27 | | | | |
| | Table 21) | | | | | |
| — | Immunoglobulin Peptide Conjugate 17 (see, Example 9, | 0.0026 | | | | |
| | Table 21) | | | | | |
| — | Immunoglobulin Peptide Conjugate 18 (see, Example 9, | 0.0077 | | | | |
| | Table 21) | | | | | |
| — | Immunoglobulin Peptide Conjugate 19 (see, Example 9, | 0.282 | | | | |
| | Table 21) | | | | | |
| — | Immunoglobulin Peptide Conjugate 20 (see, Example 9, | 0.099520 | | | | |
| | Table 21) | | | | | |
| — | Immunoglobulin Peptide Conjugate 21 (see, Example 9, | 0.028360 | 0.4181 | | 15 | |
| | Table 21) | | | | | |
| — | Immunoglobulin Peptide Conjugate 22 (see, Example 9, | 0.30761 | 3.6406 | | 12 | |
| | Table 21) | | | | | |
| — | HSA Peptide Conjugate 2 (see, Example 11, Table 23) | 0.072900 | | | | |

* = at high concentrations, compound would wash off slowly or not at all.

TABLE 14
Manual Electrophysiology by Whole Cell Patch Clamp (WCPC) of JzTx-V and JzTx-V Analogs.

| | | Fully non- | | | | | |
|---|---|---|---|---|---|---|---|
| SEQ | | inactivated | | Partially inactivated | | | |
| ID | | Mean IC50 | | Mean IC50 | | | |
| NO. | Designation | (nM) | 1.x/1.7 | (nM) | 1.x/1.7 | n | Channel type |
| 2 | JzTx-V(1-29) | 0.1415 | 1 | 0.1615 | 1 | 2 | hNav1.7 |
| 2 | JzTx-V(1-29) | 14 | 99 | 12.25 | 76 | 2 | hNav1.3 |
| 2 | JzTx-V(1-29) | 10.6 | 75 | 9.35 | 58 | 2 | hNav1.4 |
| 2 | JzTx-V(1-29) | 881.5 | 6230 | 426.5 | 2641 | 2 | hNav1.5 |
| 2 | JzTx-V(1-29) | 810 | 5724 | 530 | 3282 | 2 | hNav1.8 |
| 2 | JzTx-V(1-29) | 75 | 530 | 18 | 111 | 2 | mTTX-S |
| 2 | JzTx-V(1-29) | >>1000 | | >>1000 | | 2 | mTTX-R |
| 112 | [Glu20, Trp29]JzTx-V(1-29) | | | 279 | 1213 | 2 | mTTX-S |
| | | | | | | | (cultured DRG) |
| 112 | [Glu20, Trp29]JzTx-V(1-29) | | | 211 | 917 | 2 | mTTX-S |
| | | | | | | | (fresh DRG) |
| 112 | [Glu20, Trp29]JzTx-V(1-29) | | | 0.23 | 1 | 2 | hNav1.7 |
| 112 | [Glu20, Trp29]JzTx-V(1-29) | | | 261 | 1135 | 2 | rTTX-S |
| 425 | Pra-[Nle6]JzTx-V(1-29) | | | 5.35 | 6335 | 2 | mTTX-S |
| 425 | Pra-[Nle6]JzTx-V(1-29) | 0.0004085 | 1 | 0.0008445 | 1 | 2 | hNav1.7 |
| 392 | CyA-[Nle6, Lys(Pra)14, Glu28]JzTx-V(1-29) | | | 46.6 | | 2 | mTTX-S |
| 395 | CyA-[Nle6, Pra17, Glu28]JzTx-V(1-29) | | | 15.9 | | 2 | mTTX-S |
| 395 | CyA-[Nle6, Pra17, Glu28]JzTx-V(1-29) | | | 9.25 | | 2 | rTTX-S |
| 328 | Pra-[Nle6, Glu28]JzTx-V(1-29) | | | 0.62 | | 2 | hNav1.7 |
| 328 | Pra-[Nle6, Glu28]JzTx-V(1-29) | | | 27.2 | 44 | 2 | hNav1.1 |
| 328 | Pra-[Nle6, Glu28]JzTx-V(1-29) | | | 44.4 | 72 | 2 | hNav1.2 |
| 328 | Pra-[Nle6, Glu28]JzTx-V(1-29) | | | 52.51 | 85 | 2 | hNav1.3 |
| 328 | Pra-[Nle6, Glu28]JzTx-V(1-29) | | | 74.6 | 120 | 2 | hNav1.4 |
| 328 | Pra-[Nle6, Glu28]JzTx-V(1-29) | | | >1000 | >1613 | 2 | hNav1.5 |
| 328 | Pra-[Nle6, Glu28]JzTx-V(1-29) | | | 19.45 | 31 | 2 | hNav1.6 |
| 328 | Pra-[Nle6, Glu28]JzTx-V(1-29) | | | >1000 | >1613 | 2 | hNav1.8 |
| 328 | Pra-[Nle6, Glu28]JzTx-V(1-29) | | | 11.2 | 18 | 2 | mTTX-S |
| 328 | Pra-[Nle6, Glu28]JzTx-V(1-29) | | | 30.7 | 50 | 2 | rTTX-S |
| 443 | CyA-[Nle6, Atz(NPEG10)17, Glu28]JzTx- | | | 35.25 | | 2 | mTTX-S |
| | V(1-29) | | | | | | |
| 858 | Pra-[Nle6; 5-BrW24; Glu28]JzTx-V(1-29) | | | 0.1303 | | 2 | hNav1.7 |
| 858 | Pra-[Nle6; 5-BrW24; Glu28]JzTx-V(1-29) | | | 3.8 | 29 | 2 | mTTX-S |
| 715 | Pra-[Nle6; Glu12, 28]JzTx-V(1-29) | | | 144.5 | | 2 | mTTX-S |
| 717 | Pra-[Nle6; Glu14, 28]JzTx-V(1-29) | | | 99.75 | | 2 | mTTX-S |
| — | Immunoglobulin Peptide Conjugate 3 | | | 30 | | 2 | mTTX-S |
| | (see, Example 9, Table 21) | | | | | | |
| — | Immunoglobulin Peptide Conjugate 5 | | | 62 | | 2 | mTTX-S |
| | (see, Example 9, Table 21) | | | | | | |
| — | Immunoglobulin Peptide Conjugate 7 | | | 65 | | 2 | mTTX-S |
| | (see, Example 9, Table 21) | | | | | | |
| — | Immunoglobulin Peptide Conjugate 8 | | | 608 | | 2 | mTTX-S |
| | (see, Example 9, Table 21) | | | | | | |

TABLE 15
Electrophysiology by PatchXpress ® (PX) of JzTx-V peptide analogs: Nav1.6.

| | | PX | PX | |
|---|---|---|---|---|
| | | hNav1.7 | hNav1.6 | |
| | | Tonic | Tonic | |
| SEQ ID NO. | Designation | IC50 (uM) | IC50 (uM) | Nav1.6/Nav1.7 |
| 54 | [Glu7]JzTx-V(1-29) | | >10.0 | |
| 57 | [Glu11]JzTx-V(1-29) | | 0.2005 | |
| 60 | [Glu14]JzTx-V(1-29) | | 0.1457 | |
| 65 | [Glu23]JzTx-V(1-29) | | 9.546 | |
| 69 | [Glu28]JzTx-V(1-29) | 0.000568 | 0.2482 | 437 |
| 70 | [Glu29]JzTx-V(1-29) | 0.261300 | >10.0 | >38 |
| 112 | [Glu20,Trp29]JzTx-V | 0.001587 | 0.7198 | 454 |
| 328 | Pra-[Nle6,Glu28]JzTx-V(1-29) | 0.000548 | 0.18315 | 334 |
| 392 | CyA-[Nle6,Lys(Pra)14,Glu28]JzTx-V(1-29) | 0.001592 | 0.2495 | 157 |
| 395 | CyA-[Nle6,Pra17,Glu28]JzTx-V(1-29) | 0.000779 | 0.07318 | 94 |
| 425 | Pra-[Nle6]JzTx-V | 0.001197 | 0.06794 | 57 |
| 718 | Pra-[Nle6;Lys17;Glu28]JzTx-V(1-29) | 0.001422 | 0.1479 | 104 |
| 721 | Pra-[Nle6;Lys20;Glu28]JzTx-V(1-29) | 0.000519 | 0.2446 | 471 |
| 51 | [Glu4]JzTx-V(1-29) | 0.846700 | >10.0 | >12 |
| 708 | Glu-[Nle6;Glu28]JzTx-V(1-29) | 0.000765 | 0.5215 | 682 |
| 723 | Pra-[Nle6;Asp28]JzTx-V(1-29) | 0.005976 | 1.616 | 270 |
| 707 | Glu-Pra-[Nle6;Glu28]JzTx-V(1-29) | 0.000738 | 0.1742 | 236 |
| 709 | Pra-[Glu1,28;Nle6]JzTx-V(1-29) | 0.001127 | 0.584 | 518 |
| 712 | Pra-[Nle6;Glu8,28]JzTx-V(1-29) | 0.016370 | 6.459 | 395 |
| 714 | Pra-[Nle6;Glu11,28]JzTx-V(1-29) | 0.001577 | 1.163 | 737 |
| 715 | Pra-[Nle6;Glu12,28]JzTx-V(1-29) | 0.001726 | 0.877 | 508 |
| 717 | Pra-[Nle6;Glu14,28]JzTx-V(1-29) | 0.000975 | 2.494 | 2558 |
| 720 | Pra-[Nle6;Glu19,28]JzTx-V(1-29) | >1.0 | >10.0 | |
| 722 | Pra-[Nle6;Glu22,28]JzTx-V(1-29) | 0.022620 | >10.0 | >442 |
| 732 | CyA-[Nle6;Glu12,28;Pra17]JzTx-V(1-29) | 0.000870 | 1.715 | 1972 |
| 733 | CyA-[Nle6;Glu14,28;Pra17]JzTx-V(1-29) | 0.001189 | 0.1747 | 147 |
| 734 | Glu-Pra-[Nle6;Glu11,28]JzTx-V(1-29) | 0.002329 | 2.872 | 1233 |
| 736 | Glu-[Pra1;Nle6;Glu11,28]JzTx-V(1-29) | 0.001459 | 2.524 | 1730 |
| 738 | Glu-[Pra1;Nle6; Glu14,28]JzTx-V(1-29) | 0.000525 | 0.5625 | 1071 |
| 739 | Pra-[Glu1,11,28;Nle6]JzTx-V(1-29) | 0.005547 | 2.19 | 395 |
| 741 | Glu-Pra-[Glu1,11,28;Nle6]JzTx-V(1-29) | 0.005587 | 5.663 | 1014 |
| 742 | Pra-[Glu1,12,28;Nle6]JzTx-V(1-29) | 0.004139 | 1.378 | 333 |
| 743 | Pra-[Glu1,14,28;Nle6]JzTx-V(1-29) | 0.001356 | 2.342 | 1727 |
| 744 | Pra-[Nle6;Glu11,12,28]JzTx-V(1-29) | 0.003803 | 0.8251 | 217 |
| 748 | Glu-[Pra1;Nle6;Glu11,12,28]JzTx-V(1-29) | 0.006657 | 2.732 | 410 |
| 750 | Glu-[Pra1;Nle6; Glu11,14,28]JzTx-V(1-29) | 0.002905 | >10.0 | >3442 |
| 727 | Pra-[Nle6;Ala20;Glu28]JzTx-V(1-29) | 0.904600 | >10.0 | >11 |
| 844 | Pra-[hPhe5;Nle6;Glu28]JzTx-V(1-29) | 0.000599 | 0.9982 | 1666 |
| 858 | Pra-[Nle6;5-BrW24;Glu28]JzTx-V(1-29) | 0.000059 | 0.04924 | 829 |
| — | Immunoglobulin Peptide Conjugate 3 (see, Example | 0.0023 | 0.3534 | 154 |
| | 9, Table 21) | | | |
| — | Immunoglobulin Peptide Conjugate 5 (see, Example | 0.0078 | 2.4121 | 309 |
| | 9, Table 21) | | | |
| — | Immunoglobulin Peptide Conjugate 7 (see, Example | 0.0746 | 8.2024 | 110 |
| | 9, Table 21) | | | |
| — | Immunoglobulin Peptide Conjugate 8 (see, Example | 0.075 | 4.6704 | 62 |
| | 9, Table 21) | | | |

TABLE 16
Electrophysiology by PatchXpress ® (PX) of JzTx-V peptide analogs: Rodent Nav.

| SEQ | | PX hNav1.7 | PX rNav1.7 | | PX mNav1.7 | | PX mNav1.4 | |
|---|---|---|---|---|---|---|---|---|
| ID | | Tonic IC50 | Tonic IC50 | rNav1.7/ | Tonic IC50 | mNav1.7/ | Tonic IC50 | mNav1.4/ |
| NO. | Designation | (uM) | (uM) | hNav1.7 | (uM) | hNav1.7 | (uM) | mNav1.7 |
| 112 | [Glu20, Trp29]JzTx-V | 0.001587 | 0.001303 | 0.82 | 0.005077 | 3.20 | | |
| 247 | Atz(NPEG9)-[Nle6]JzTx-V(1-29) | 0.004300 | 0.000961 | 0.22 | 0.007106 | 1.65 | | |
| 328 | Pra-[Nle6, Glu28]JzTx-V(1-29) | 0.000548 | 0.000641 | 1.17 | 0.009858 | 17.99 | 0.11925 | 12 |
| 361 | Leu-[Nle6]JzTx-V(1-29) | 0.000130 | | | 0.001329 | 10.22 | 0.00180 | 1.4 |
| 364 | Trp-[Nle6]JzTx-V(1-29) | 0.000330 | | | 0.001343 | 4.07 | | |
| 366 | CyA-[Nle6]JzTx-V(1-29) | 0.000310 | | | 0.000957 | 3.09 | | |
| 369 | Nva-[Nle6]JzTx-V(1-29) | 0.000820 | | | | | 0.00454 | |
| 373 | D-Leu-[Nle6]JzTx-V(1-29) | 0.000150 | | | 0.012600 | 84.00 | | |
| 375 | Sar-[Nle6]JzTx-V(1-29) | 0.000320 | | | 0.003445 | 10.77 | | |
| 392 | CyA-[Nle6, Lys(Pra)14, Glu28] | 0.001592 | 0.002729 | 1.71 | 0.009788 | 6.15 | 0.06275 | 6.4 |
| | JzTx-V(1-29) | | | | | | | |
| 395 | CyA-[Nle6, Pra17, Glu28]JzTx-V(1-29) | 0.000779 | 0.001412 | 1.81 | 0.004804 | 6.16 | 0.03217 | 6.7 |
| 425 | Pra-[Nle6]JzTx-V | 0.001197 | 0.000522 | 0.44 | 0.000511 | 0.43 | 0.00018 | 0.35 |
| 443 | CyA-[Nle6, Atz(NPEG10)17, Glu28]JzTx- | 0.011715 | 0.005447 | 0.46 | 0.026100 | 2.23 | | |
| | V(1-29) | | | | | | | |
| 729 | Pra-[Nle6; Glu12; Lys17]JzTx-V(1-29) | 0.001872 | 0.000653 | 0.35 | 0.001270 | 0.68 | 0.00277 | 2.2 |
| 728 | Pra-[Nle6; Glu12, 28; Lys17]JzTx-V(1-29) | 0.008758 | 0.002014 | 0.23 | 0.004400 | 0.50 | 0.06301 | 14 |
| 730 | Pra-[Nle6; Glu12]JzTx-V(1-29) | 0.001189 | 0.000580 | 0.49 | 0.000610 | 0.51 | 0.00636 | 10 |
| 709 | Pra-[Glu1, 28; Nle6]JzTx-V(1-29) | 0.001127 | 0.001378 | 1.22 | 0.009482 | 8.41 | 0.25940 | 27 |
| 714 | Pra-[Nle6; Glu11, 28]JzTx-V(1-29) | 0.001577 | 0.001500 | 0.95 | 0.016670 | 10.57 | 0.56510 | 34 |
| 715 | Pra-[Nle6; Glu12, 28]JzTx-V(1-29) | 0.001726 | 0.002661 | 1.54 | 0.016160 | 9.37 | 0.54780 | 34 |
| 296 | Pra-[Nle6; Trp29]JzTx-V(1-29) | 0.004787 | | | 0.010680 | 2.23 | 0.00967 | 0.91 |
| 886 | Atz(NPEG23)-[Nle6]JzTx-V(1-29) | 0.003091 | | | 0.006910 | 2.24 | | |
| 891 | CyA- | 0.006093 | 0.008696 | 1.43 | 0.036140 | 5.93 | | |
| | [Nle6, Lys(Atz(NPEG10))14, Glu28]JzTx- | | | | | | | |
| | V(1-29) | | | | | | | |
| 330 | [Nle6; Pra11; Glu28]JzTx-V(1-29) | 0.000473 | 0.003834 | 8.10 | 0.003693 | 7.81 | | |
| 738 | Glu-[Pra1; Nle6; Glu14, 28]JzTx-V(1-29) | 0.000563 | 0.003345 | 5.94 | 0.016131 | 28.63 | | |
| 858 | Pra-[Nle6; 5-BrW24; Glu28]JzTx-V(1-29) | 0.000039 | 0.002429 | 62.26 | 0.000911 | 23.34 | | |
| 859 | Pra-[Nle6; Chg23; Glu28]JzTx-V(1-29) | 0.000489 | 0.003267 | 6.68 | 0.000884 | 1.81 | | |
| 861 | Pra-[Nle6; Glu28; Phe29]JzTx-V(1-29) | 0.000388 | 0.000296 | 0.76 | 0.003450 | 8.90 | | |
| 450 | Pra-[Nle6; Glu28; Trp29]JzTx-V(1-29) | 0.000352 | 0.000097 | 0.27 | 0.003108 | 8.82 | | |
| 520 | CyA-[Nle6; Pra11; Glu28]JzTx-V(1-29) | 0.000193 | 0.002239 | 11.58 | 0.004037 | 20.87 | | |
| — | Homodimeric Conjugate No. 8 (see, | 0.000679 | 0.002101 | 3.09 | 0.000593 | 0.87 | | |
| | Example 5) | | | | | | | |
| — | Homodimeric Conjugate No. 9 (see, | 0.001319 | 0.003605 | 2.73 | 0.005318 | 4.03 | | |
| | Example 5) | | | | | | | |
| — | Immunoglobulin Peptide Conjugate 1 | 0.0023 | 0.0022 | 1 | | | | |
| | (see, Example 9, Table 21) | | | | | | | |
| — | Immunoglobulin Peptide Conjugate 2 | 0.001 | 0.0027 | 2.7 | | | | |
| | (see, Example 9, Table 21) | | | | | | | |
| — | Immunoglobulin Peptide Conjugate 3 | 0.0023 | 0.0033 | 1.4 | 0.0047 | 2 | 0.365 | 78 |
| | (see, Example 9, Table 21) | | | | | | | |
| — | Immunoglobulin Peptide Conjugate 4 | 0.002 | 0.0036 | 1.8 | | | | |
| | (see, Example 9, Table 21) | | | | | | | |
| — | Immunoglobulin Peptide Conjugate 7 | 0.0746 | | | 0.17 | 2.3 | | |
| | (see, Example 9, Table 21) | | | | | | | |
| — | Immunoglobulin Peptide Conjugate 8 | 0.075 | | | 0.3065 | 4 | | |
| | (see, Example 9, Table 21) | | | | | | | |
| — | Immunoglobulin Peptide Conjugate 12 | 0.003 | 0.0021 | 0.7 | | | | |
| | (see, Example 9, Table 21) | | | | | | | |
| — | Immunoglobulin Peptide Conjugate 14 | 0.0017 | 0.0024 | 1.4 | | | | |
| | (see, Example 9, Table 21) | | | | | | | |
| — | HSA Peptide Conjugate 2 (see, Example | 0.0729 | 0.0415 | 0.57 | 0.1791 | 2.46 | | |
| | 11, Table 23) | | | | | | | |

### Example 4

### Plasma Stability Studies

[0942] The stability of JzTx-V peptide analogs were studied in human, cynomolgus monkey (“cyno”), rat and mouse plasmas. Peptide stock solutions were made from JzTx-V peptide analog reference standards in 50/50 (v/v) methanol/water and stored at −20° C. 1 mg/mL peptide stock solutions were used to prepare 20 μg/mL peptide working solutions in HPLC grade water. The peptide working solutions were stored in a refrigerator at 2 to 8° C. prior to use.

[0943] Stability samples were prepared by adding 225 μl plasma into the vials containing 25 μl of 20 μg/mL peptide working solutions and were incubated at 37° C. The initial concentration was 2 μg/mL for each peptide in human, rat, or mouse plasma. 25 μl plasma samples at five time points (0, 2, 4, 8 and 24 hours) were aliquoted into the appropriate well of a 96-well plate, followed by the addition of 25 μl of internal standard solution (100 ng/mL, peptide analog made in 50/50 methanol/water) and 100 μL of 0.1% formic acid and the samples were vortex mixed. An Oasis HLB μElution 96-well solid phase extraction plate was used to extract JzTx-V peptide analog peptides from the pretreated plasma samples and the extracts were injected (10 μL) onto the LC-MS/MS system for analysis.

[0944] The LC-MS/MS consisted of an Acquity UPLC system (Waters, Milford, Mass.) coupled to a 5500 QTRAP mass spectrometer (AB Sciex, Toronto, Canada) with a Turbo IonSpray® ionization source. The analytical column was an Acquity UPLC BEH C₁₈ 2.1 mm×50 mm column. The mobile phases were 0.1% formic acid in acetonitrile/water (5/95, v/v, mobile phase A) and 0.1% formic acid in acetonitrile/water (95/5, v/v, mobile phase B). Data was collected and processed using AB Sciex Analyst® software (version 1.5).

[0945] The plasma stability of the tested peptides were derived from the peak area ratios corresponding to peptides and internal standard obtained from the LC-MS/MS analysis, all data were normalized to the value at 0-hr time point. Results are shown in Table 17, Table 18, Table 19, and Table 20, below. JzTx-V peptide analogs tested showed remarkable stability in human, cyno, mouse, and rat plasma, likely due to their compact, disulfide-stabilized structure.

TABLE 17
Stability of JzTx-V peptide analogs in human plasma.

| | % Peptide Remaining | |
|---|---|---|
| Incubation | [Glu20,Trp29]JzTx-V(1-29); | [Glu20,Ser28]JzTx-V(1-29); |
| Time (hr) | SEQ ID No. 112 | SEQ ID No. 138 |
| 0 | 100 | 100 |
| 2 | 95 | 86 |
| 4 | 84 | 82 |
| 6 | 75 | 72 |
| 8 | 71 | 68 |
| 24 | 48 | 49 |

TABLE 18
Stability of JzTx-V peptide analogs in cyno plasma.

| | % Peptide Remaining | |
|---|---|---|
| Incubation | [Glu20,Trp29]JzTx-V(1-29); | [Glu20,Ser28]JzTx-V(1-29); |
| Time (hr) | SEQ ID No. 112 | SEQ ID No. 138 |
| 0 | 100 | 100 |
| 2 | 93 | 78 |
| 4 | 91 | 75 |
| 6 | 90 | 69 |
| 8 | 91 | 62 |
| 24 | 89 | 59 |

TABLE 19
Stability of JzTx-V peptide analogs in mouse plasma.

| | % Peptide Remaining | |
|---|---|---|
| Incubation | [Glu20,Trp29]JzTx-V(1-29); | [Glu20,Ser28]JzTx-V(1-29); |
| Time (hr) | SEQ ID No. 112 | SEQ ID No. 138 |
| 0 | 100 | 100 |
| 2 | 88 | 64 |
| 4 | 82 | 61 |
| 6 | 85 | 55 |
| 8 | 85 | 51 |
| 24 | 77 | 50 |

TABLE 20
Stability of JzTx-V peptide analogs in rat plasma.

| | % Peptide Remaining | |
|---|---|---|
| Incubation | [Glu20,Trp29]JzTx-V(1-29); | [Glu20,Ser28]JzTx-V(1-29); |
| Time (hr) | SEQ ID No. 112 | SEQ ID No. 138 |
| 0 | 100 | 100 |
| 2 | 95 | 90 |
| 4 | 93 | 81 |
| 6 | 92 | 71 |
| 8 | 89 | 67 |
| 24 | 70 | 59 |

### Example 5

### PEGylated Conjugates of JzTx-V Peptide Analogs Studies

[0946] To identify sites within JzTx-V(1-29) (SEQ ID NO:2) that could be modified with a half-life extending moiety, a set of positional analogs was prepared containing norleucine at position 6 relative to SEQ ID NO:2 in place of the oxidizable methione and propargylglycine (Pra) at each non-cysteine position. This “Pra scan” was repeated with a [Nle6,Glu20]JzTx-V(1-29) scaffold. After folding, the alkyne-containing peptide was subjected to copper catalyzed 1,3-dipolar cycloaddition with a ˜500 Da MW azido PEG to obtain the site-specifically PEGylated peptides with a triazole linkage, thus converting the propargylglycine or Pra residue in the sequence to a 3-(1,2,3-triazol-4-yl)alanine or Atz residue. (See FIG. 76A-B). Electrophysiological screening of this series of analogs (Table 9 and Table 13, above) identified several positions within JzTx-V, including the N-terminus and positions 1, 11, and 17 of SEQ ID NO:2, where a large chemical moiety could be introduced without significantly reducing potency at Na_{V}1.7. In general, these locations tend to be on the surface of JzTx-V, opposite or around the periphery of the hydrophobic face. Not all of the designed analogs in these series were successfully prepared via the high-throughput peptide synthesis approach. Additional positions were investigated and identified as potential conjugation sites, including positions 10, 12, 13, 14, and 20 relative to SEQ ID NO:2. Having identified these positions, peptide-linker constructs capable of conjugation to an engineered free cysteine residue within an IgG or Fc and homodimeric constructs of Atz-[Nle6]JzTx-V(1-29) (SEQ ID NO:571) were prepared (See, FIG. 81A) and tested (See, Table 9 and Table 13). Two of these homodimers, one with a reactive bromoacetamide functionality (see, Example 10). The bromoacetimide functionality was reacted with benzyl mercaptan to prevent deleterious reaction during assay analysis. Homodimeric conjugates were designated as follows (*=ethyl):

[0947] Bis-{Atz(PEG23*)-[Nle6]JzTx-V(1-29)}-5-((2-bromoacetamido)methyl)isophthalamide (“Homodimeric Conjugate No. 1”) (See, FIG. 81A-2);

[0948] Bis-{Atz(PEG23*)-[Nle6]JzTx-V(1-29)}-5-((2-(benzylthio)acetamido)methyl)isophthalamide (“Homodimeric Conjugate No. 2”) (See, FIG. 81A-2);

[0949] [Phe6,Atz(2 kDa EtO-PEG*-[Phe6,Atz13*]GpTx-1(1-34)1)13]GpTx-1(1-34) (“Homodimeric Conjugate No. 3”)(See, FIG. 75A-B);

[0950] [Phe6,Atz(500 Da EtO-PEG*-[Phe6,Atz13*]GpTx-1(1-34)1)13]GpTx-1(1-34) (“Homodimeric Conjugate No. 4”);

[0951] [Ala5,Phe6,Atz(2 kDa EtO-PEG*-{[Ala5,Phe6,Atz13*,Leu26,Arg28]GpTx-1(1-34)})13,Leu26,Arg28]GpTx-1(1-34) (“Homodimeric Conjugate No. 5”).

### Example 6

### NMR Structure Determination of Pra-[Nle6]JzTx-V(1-29)

[0952] The structure of Pra-[Nle6]JzTx-V(1-29)(SEQ ID NO:425) was obtained by high resolution NMR spectroscopy in water, pH 4.5 and T=320 K. The data were collected on a Bruker Avance III 800 MHz spectrometer using 2D NOESY, TOCSY, and HMBC experiments. (See Wutchrich, NMR of Proteins and Nucleic Acids, John Wiley & Sons, Canada, (1986)). The N-terminus of the peptide appeared to be disordered at this temperature, as resonances could not be identified for the three most N-terminal residues. The structure was calculated from 283 NOE constraints, 4 CHI1 angle constraints for cysteine side-chains derived from PADLOC (See Poppe L.; Hui J. O.; Ligutti, J.; Murray, J. K.; Schnier, P. D; PADLOC: a powerful tool to assign disulfide bond connectivities in peptide and proteins by NMR spectroscopy, Analytical Chemistry 84(1): 262-266 (2011)), and 3 disulfide-bond constraints, using Cyana 2.1 software. Glycine was modeled as a substitution for the N-terminal propargylglycine to simplify the structural calculations. The final RMSD for the backbone atoms of residues 5-30 was 0.45±0.07 Å (0.74±0.12 Å for all heavy atoms) and had no NOE or angle constraint violations. (See FIG. 48 for the overlay of the 20 lowest energy conformations of the peptide backbone, FIG. 49 for the overlay of the heavy atoms from the 20 lowest energy conformations of the peptide, FIG. 50 for a ribbon representation of the lowest energy conformation of the peptide backbone, and FIG. 51 for the overlay of the ribbon representations of the 20 lowest energy conformation of the peptide backbone). The structure confirms the disulfide connectivity of the six cysteine residues as C₂-C₁₆, C₉-C₂₁, and C₁₅-C₂₅ or a C1-C4, C2-C5, C3-C6 pattern, confirming that Pra-[Nle6]JzTx-V(1-29)(SEQ ID NO:425) is a member of the inhibitory cystine knot (ICK) family of peptides.

[0953] The folded structure of Pra-[Nle6]JzTx-V(1-29)(SEQ ID N):425) is amphipathic in nature with a hydrophobic face on one side of the molecule. (See, FIG. 52). The hydrophobic face is ringed by a number of hydrophilic (mostly cationic) residues. The opposite face of the folded peptide is more neutral in character. The systematic analoging of JzTx-V, in particular the positional scanning with alanine, arginine and glutamic acid, identifies several residues as being critical for activity at Na_{V}1.7. (See, FIG. 53). These residues, namely Trp5, Met6, Trp7, Leu23, Trp24, and Ile34, relative to SEQ ID NO:2, are clustered on the one face of JzTx-V. The hydrophobic side chains of residues Leu23, Trp24, and Ile34 of SEQ ID NO:425 align on one face of the C-terminal strand, while Trp5 and Met6 are adjacent to that strand to form the hydrophobic face. Trp7 further expands that hydrophobic face. Since changes that alter the nature of this face disrupt activity against Na_{V}1.7, this may be the portion of the molecule that interacts with the VGSCs at the binding interface. It was also observed that the N-terminus of the folded JzTx-V peptide was positioned the hydrophobic C-terminal residue Ile29 relative to SEQ ID NO:2. Although a glycine residue was used in the structure calculation, it was apparent that extending the N-terminus of the peptide with a hydrophobic residue, such as propargylglycine in Pra-[Nle6]JzTx-V(1-29) (SEQ ID NO:425), could position that residue in close proximity to the hydrophobic face of the molecule where it could contribute the binding interaction. This may help to explain the increased hNav1.7 potency of Pra-[Nle6]JzTx-V(1-29) (SEQ ID NO:425) and other N-terminally extended analogs. Substitution of a glutamic acid residue for either Arg20 or Ile28 resulted in increased selectivity against Nav1.4. (See Table 6, Table 11, and FIG. 54). Arg20 is quite distant from the hydrophobic face in the Pra-[Nle6]JzTx-V NMR structure. The guanadine of the Arg20 side chain is in close proximity to the carboxylic acid of Glu17, and these two functionalities may engage in a salt bridge that stabilizes the JzTx-V structure. Substitution of glutamic acid for arginine at position 20 would not only disrupt this possible salt bridge but create a repulsive electrostatic interaction that could alter the peptide conformation. It may be that the Glu20 substitution increases the Nav1.4 selectivity of JzTx-V more by influencing the conformation of the peptide than through a direct interaction with the channel. Conversely, Ile28 is located at the periphery of the hydrophobic face. Substitution of glutamic acid at position 28 also increases the Nav1.4 selectivity of JzTx-V, likely through a direct binding interaction with the channel. The NMR structure os Pra-[Nle6]JzTx-V shows that a number of the residues that can be modified without affecting potency and that have been explored as potential conjugation sites are on the face of the peptide opposite the hydrophobic face, i.e. positions 11, 14, and 17.

### Example 7

### Preliminary Pharmacokinetic Determinations in Rodents

[0954] Pharmacokinetic Studies.

[0955] A preliminary pharmacokinetic (PK) study was conducted with 7 week-old unmodified CD-1 mice from Taconic. [Glu20,Trp29]JzTx-V(1-29) (SEQ ID NO:112) was dosed to 6 mice at 1 mg/kg subcutaneously. Blood samples were taken at 0.5, 1, 1.5, 2, 3, and 4 hours post-dose from 3 mice at each time point. For each sample 15 μL of blood was collected via the carotid artery catheter and mixed in 35 μL of 0.1 M citrate buffer. Samples were then frozen at −80° C. until analysis.

[0956] LC-MS/MS Analytical Procedure.

[0957] Peptide stock solutions (1 mg/mL) were made from peptide reference standards in 50/50 (v/v) methanol/water and stored at −20° C. 1 mg/mL peptide stock solutions were used to prepare 100 μg/mL peptide working solution in 50/50 (v/v) methanol/water. The peptide working solutions were stored in a refrigerator at 2 to 8° C.

[0958] Standard samples were prepared in citrate-buffered mouse blood (blood/0.1M citrate buffer, 30/70, v/v). Standards concentrations of 5, 10, 25, 50, 100, 250, 500 and 1000 ng/mL were prepared by serial dilution of a freshly prepared 5000 ng/mL solution in citrate-buffered mouse blood using the 100 μg/mL peptide working solution. 25 μl blood samples were aliquoted into the appropriate well of a 96-well plate, followed by the addition of 50 μl of internal standard solution (100 ng/mL, peptide analog made in 50/50 methanol/water) and 150 μL of 0.1M ZnSO₄ and the samples were vortex mixed for 5 min, then centrifuge for 10 min at 4000 rpm. Supernatant was then extracted using an Oasis HLB μElution 96-well solid phase extraction plate to extract peptides and the extracts were injected (10 μL) onto the LC-MS/MS system for analysis.

[0959] The LC-MS/MS consisted of an Acquity UPLC system (Waters, Milford, Mass.) coupled to a 5500 QTRAP mass spectrometer (AB Sciex, Toronto, Canada) with a Turbo IonSpray® ionization source. The analytical column was an Acquity UPLC BEH C₁₈ 2.1 mm×50 mm column. The mobile phases were 0.1% formic acid in acetonitrile/water (5/95, v/v, mobile phase A) and 0.1% formic acid in acetonitrile/water (95/5, v/v, mobile phase B). Data was collected and processed using AB Sciex Analyst® software (version 1.5).

[0960] The calibration curve was derived from the peak area ratios (peptide/internal standard) using 1/x² weighted linear least-squares regression of the area ratio versus the concentration of the corresponding peptide standard. The regression equation from the calibration standards was used to back calculate the measured concentration for each standard and blood samples.

[0961] Results.

[0962] In the pharmacokinetic study a 1 mg/kg subcutaneous (s.c.) dose of [Glu20,Trp29]JzTx-V(1-29)(SEQ ID NO:112) to mice was tolerated and showed measurable plasma concentrations for 4 h with an approximate in vivo half-life of 2.08 h. The dose yielded peptide concentrations in the plasma that were sustained at about 0.04 μM, 26-fold over the in vitro hNav1.7 IC₅₀ by PatchXpress® (PX), for 3 h, which was deemed suitable for further in vivo testing. (See, FIG. 55).

[0963] Additional Mouse Pharmacokinetic Studies.

[0964] A preliminary pharmacokinetic (PK) study was conducted for CyA-[Nle6,Pra17,Glu28]JzTx-V(1-29) (SEQ ID NO:395) and Pra-[Nle6,Glu28]JzTx-V(1-29) (SEQ ID NO:328) with 10 week-old CD-1 mice from Charles River Laboratories. Each test compound was dosed to 6 mice at 2 or 5 mg/kg by subcutaneous administration under the skin on the back. Blood samples were taken at various time points using composite sampling scheme. For each sample 50 μL of blood was collected via submandibular vein puncture and then transferred into a blood collection tube containing K₂EDTA as an anticoagulant. Samples were processed for plasma and transferred to a 96-well plate then frozen at −80° C. until analysis.

[0965] A preliminary pharmacokinetic (PK) study was conducted with 10 week-old female Sprague-Dawley rats from Charles River Laboratories. CyA-[Nle6,Pra17,Glu28]JzTx-V(1-29) (SEQ ID NO:395) was dosed to 6 rats (2 per dose) at 1, 3 or 10 mg/kg subcutaneously under the skin over the shoulders. Blood samples were taken at 1, 3 and 5 hours by tail vein nick and at 24 hours by abdominal aorta while the rats were under isofurane anesthesia. For each sample 200 μL of blood was collected and dispensed into a blood collection tube containing K₂EDTA as an anticoagulant. Samples were processed for plasma and transferred to a 96-well plate then frozen at −80° C. until analysis.

[0966] LCMS Analytical Method for the Peptides.

[0967] Standard samples were prepared in mouse or rat plasma. Standards concentrations of 0.3, 0.6, 1.2, 2.4, 4.8, 9.6, 20, 40, 80, 156, 312, 625, 1250, 2500, 5000 ng/mL were prepared by serial dilution of a freshly prepared 10000 ng/mL solution in mouse or rat plasma using the 100 μg/mL peptide working solution. 50 μl plasma samples were aliquoted into the appropriate well of a 96-well plate, followed by the addition of 50 μl of internal standard solution (100 ng/mL, peptide analog made in 50/50 methanol/water) and 100 μL of 8M guanidine HCl solution and the samples were vortex mixed for 5 min, then extracted using an Oasis HLB μElution 96-well solid phase extraction plate to extract peptides and the extracts were injected (10 μL) onto the LC-MS/MS system for analysis.

[0968] The LC-MS/MS consisted of a Shimadzu LC-AD20 system (Shimadzu, Columbia, Md.) coupled to a 4000 QTRAP mass spectrometer (AB Sciex, Toronto, Canada) with a Turbo IonSpray® ionization source. The analytical column was an ACE Phenyl 5, 2.1 mm×50 mm column. The mobile phases were 0.1% formic acid in acetonitrile/water (mobile phase A) and 0.1% formic acid in acetonitrile/water (mobile phase B). Data was collected and processed using AB Sciex Analyst® software (version 1.6).

[0969] The calibration curve was derived from the peak area ratios (peptide/internal standard) using 1/x² weighted linear least-squares regression of the area ratio versus the concentration of the corresponding peptide standard. The regression equation from the calibration standards was used to back calculate the measured concentration for each standard and plasma samples.

[0970] Mouse Pharmacokinetic Studies for the Immunoglobulin-Peptide Conjugates.

[0971] A preliminary pharmacokinetic (PK) study was conducted with 10 week-old CD-1 mice from Charles River Laboratories. Each tested conjugate was dosed to 6 to 9 mice at 5 mg/kg intravenously via the lateral tail vein or subcutaneously under the skin over the shoulders. Blood samples were taken at various time points using composite sampling scheme with no more than 3 samples taken from an individual mouse. For each sample 60 μL of blood was collected via submandibular and retro orbital sinus vein puncture and dispensed into a serum separator tube. Samples were allowed to clot at room temperature for 20 minutes and then centrifuged under refrigerated conditions (2-8° C.) for 15 minutes at approximately 11500×g. Serum was transferred to a 96-well plate and frozen at −80° C. until analysis.

[0972] LC-MS/MS Analytical Procedure for the Peptide Conjugates.

[0973] Peptide conjugate stock solutions (1 mg/mL) were made from peptide conjugate reference standards in A5Su buffer and stored at −70° C. 1 mg/mL peptide conjugate stock solutions were used to prepare 100 μg/mL conjugate working solution in A5Su buffer. The conjugate working solutions were stored in a refrigerator at 2 to 8° C.

[0974] Standard samples were prepared in mouse serum. Standards concentrations of 50, 100, 250, 500, 1000, 2500, 5000 and 10,000 ng/mL were prepared by serial dilution of a freshly prepared 10,000 ng/mL solution in mouse serum using the 100 μg/mL peptide conjugate working solution. 25 μl mouse serum samples were aliquoted into the appropriate well of a 96-well plate, followed by the addition of 25 μl of DPBS (2× inhibitor) and 25 uL of magnetic beads with anti-human Fc immunoaffinity capture antibody. Samples were then incubated for 60 min at room temperature. After washing with 250 mM Tris buffer, the beads with captured peptide conjugate analyte were reduced by tris(2-carboxyethyl) phosphine (TCEP) and digested by trypsin. After quenched with 1% formic acid, samples were centrifuged and the supernatant was transferred to a 96-well plate then injected (10 μL) onto the LC-MS/MS system for analysis.

[0975] The LC-MS/MS consisted of an Acquity UPLC system (Waters, Milford, Mass.) coupled to a 5500 QTRAP mass spectrometer (AB Sciex, Toronto, Canada) with a Turbo IonSpray® ionization source. The analytical column was an Acquity UPLC BEH C18 column (2.1 mm×50 mm) The mobile phases were 0.1% formic acid in acetonitrile/water (5/95, v/v, mobile phase A) and 0.1% formic acid in acetonitrile/water (95/5, v/v, mobile phase B). Data was collected and processed using AB Sciex Analyst® software (version 1.5).

[0976] The calibration curve was derived from the peak area ratios (peptide/internal standard) using 1/x² weighted linear least-squares regression of the area ratio versus the concentration of the corresponding peptide standard. The regression equation from the calibration standards was used to back calculate the measured concentration for each standard and blood samples.

### Example 8

### In Vivo Pain Models

[0977] The compositions of the present invention can be tested in any relevant in vivo pain models. Examples include:

[0978] Tactile Allodynia—Von Frey Test.

[0979] Von Frey filaments are used to assess mechanical sensitivity in rodents. Mice are placed on a wire mesh floor, enclosed in an individual testing chamber and allowed to acclimate until calm. Calibrated filaments of various bending forces are then applied to the paw of a mouse to measure the response to a non-noxious tactile (e.g., touch) stimulus. The pattern of responses and non-responses to the series of filaments determines the animal's mechanical threshold. This threshold is used as the endpoint of the assay.

[0980] Rat Neuropathic Pain Model.

[0981] Male Sprague-Dawley rats (200 g) are anesthetized with isoflurane inhalant anesthesia and the left lumbar spinal nerves at the level of L5 and L6 are tightly ligated (4-0 silk suture) distal to the dorsal root ganglion and prior to entrance into the sciatic nerve, as first described by Kim and Chung (An experimental model for peripheral neuropathy produced by segmental spinal nerve ligation in the rat. Pain 50:355-363, (1992)). The incisions are closed and the rats are allowed to recover. This procedure results in mechanical (tactile) allodynia in the left hind paw as assessed by recording the pressure at which the affected paw (ipsilateral to the site of nerve injury) is withdrawn from graded stimuli (von Frey filaments ranging from 4.0 to 148.1 mN) applied perpendicularly to the plantar surface of the paw (between the footpads) through wire-mesh observation cages. A paw withdrawal threshold (PWT) is determined by sequentially increasing and decreasing the stimulus strength and analyzing withdrawal data using a Dixon non-parametric test, as described by Chaplan, S. R., et al. (Quantitative assessment of tactile allodynia in the rat paw. J. Neurosci. Meth, 53:55-63 (1994)).

[0982] Rat CFA Inflammatory Pain Model.

[0983] Male Sprague-Dawley rats (200 g) are injected in the left hindpaw with complete Freund's adjuvant (CFA). This procedure results in mechanical (tactile) and thermal allodynia in the left hind paw as assessed by recording the pressure at which the affected paw is withdrawn from graded stimuli (von Frey filaments ranging from 4.0 to 148.1 mN) applied perpendicularly to the plantar surface of the paw (between the footpads) through wire-mesh observation cages or by applying radiant heat. PWT is determined by sequentially increasing and decreasing the stimulus strength and analyzing withdrawal data using a Dixon non-parametric test, as described by Chaplan et al. (1994). Rats are included in the study only if they do not exhibit motor dysfunction (e.g., paw dragging or dropping) or broken skin and their PWT is below 39.2 mN (equivalent to 4.0 g). At appropriate times after CFA injection rats are treated with test peptides and/or test vehicle-conjugated peptides (usually a screening dose of 60 mg/kg) or control solution (PBS or other vehicle) once by s.c. injection and PWT is determined Average paw withdrawal threshold (PWT) was converted to percent of maximum possible effect (% MPE) using the following formula: % MPE=100* (PWT of treated rats−PWT of control rats)/(15-PWT of control rats). Thus, the cutoff value of 15 g (148.1 mN for mechanical allodynia) is equivalent to 100% of the MPE and the control response is equivalent to 0% MPE.

[0984] Preferred molecules of the present invention are expected to produce an antinociceptive effect with a PD with appropriate exposures compared to IC₅₀ on the target.

[0985] Mouse Formalin Pain Model Experimental Procedure.

[0986] Formalin injection into a rodent paw evokes a well-studied form of pain quantitated by the number of times the animal flinches its paw. The pain following formalin injection comes in two characteristic phases: a first phase lasts approximately ten minutes and likely corresponds to the immediate pain mediated by peripheral neurons. The second phase, beginning approximately ten minutes after formalin injection and lasting for another 30 to 40 minutes, corresponds to sensitization of neurons in the spinal cord and hyperactivity of peripheral pain-sensing neurons. Compounds represented in this application were tested to see if they reduce the number of flinches in phase II of the formalin response and so are potential analgesic drugs (Bregman H et al., “Identification of a potent, state-dependent inhibitor of Nav1.7 with oral efficacy in the formalin model of persistent pain.” J Med Chem 54(13):4427-4445, 2011).

[0987] Male CD-1 mice (8-12 weeks of age, Harlan Laboratories, Frederick, Md.) were used for all in vivo efficacy experiments. Animal subjects had free access to food (Teklad Global Soy Protein-Free Extruded Rodent Diet 2020X) and water and were maintained on a 12-h light/dark cycle for the entire duration of the study. All animals were housed on standard solid-bottomed caging with corn cob bedding with 1 animal per cage. The animal colony was maintained at approximately 21° C. and 60% humidity. All experiments were conducted in accordance with the International Association for the Study of Pain guidelines.

[0988] On test day, during or before acclimation, the animals were dosed with either an investigational compound or vehicle. Following dose administration, all mice (n=12) were conditioned to behavioral analysis chambers (dimensions: 10 cm diameter, 14 cm tall cylinder with lid on top of elevated glass) for 5 minutes prior to the formalin injection. Video cameras were set underneath for recording the mouse behavior (5 minute acclimation and 40 minute test session). At test time, mice were lightly restrained in a cloth glove and injected with 20 μL of a 2% formalin solution into the dorsal surface of the left hind paw using an insulin syringe (U100, 0.3 cc, 28-30G) Immediately following the formalin injection, animals were returned to the chamber and observed for 40 minutes. Paw lifting/licking behavior was recorded in 5 minute intervals after which ipsilateral and contralateral paw widths were measured. After study completion animals were immediately euthanized.

[0989] In the first mouse formalin pain model study, [Glu20,Trp29]JzTx-V(1-29) (SEQ ID NO:112) was dosed at 0.1, 0.3, and 1.0 mg/kg s.c. 1-hour pre-treatment with morphine at 3 mg/kg s.c. 30-min pre-treatment as the positive control. (See, FIG. 56). The peptide had no effect on time spent lifting and/or licking the affected paw in either the first or acute phase (0-5 minutes post-formalin injection) or during the second phase (5-40 minutes post-formalin injection) compared to vehicle (PBS). (See, FIG. 57 and FIG. 58). In this experiment the 3 mg/kg s.c. dose of morphine used as a positive control significantly reduced the pain response in the animals. The terminal plasma exposure (peptide plasma concentrations at 45 min post-formalin injection) for the peptide was 0.0278±0.0105, 0.121±0.0411, and 0.412±0.0858 μM for the 0.1, 0.3, or 1.0 mg/kg doses, respectively.

[0990] The mouse formalin pain model was repeated with a 1-hour pre-treatment dose of 5.0 mg/kg s.c. of [Glu20,Trp29]JzTx-V(1-29) (SEQ ID NO:112). (See, FIG. 59). The peptide had no effect on the time spent lifting/licking the affected paw in either the first phase (0-5 minutes post formalin injection) or second phase (5-40 minutes post formalin injection) compared to the vehicle (PBS). (See, FIG. 60 and FIG. 61). The positive control, a 3 mg/kg s.c. dose of morphine, did significantly reduce the time spent lifting/licking the affected paw in the first and second phases. Terminal exposure (peptide plasma concentration at 45 min post formalin injection) was 2.63±0.777 μM for the 5.0 mg/kg dose. This peptide plasma concentration is only about 10-fold over the IC50 of [Glu20,Trp29]JzTx-V(1-29) (SEQ ID NO:112) for blocking the TTX-S current in mouse DRG neurons in the WCPC format. It is likely that the in vivo Nav1.7 target coverage was insufficient to produce efficacy in this pain model.

[0991] Mouse Complete Freund's Adjuvant (CFA)—Induced Thermal Hyperalgesia Experimental Procedure.

[0992] The CFA-induced inflammatory pain model is a widely used animal model to study inflammatory pain mechanisms. The classical symptoms of this model are swelling of the CFA-injected paw (edema), redness, allodynia and hyperalgesia. These symptoms develop within 2-3 hours of CFA injection and last more than seven days.

[0993] Male CD-1 mice (8-12 weeks of age, Harlan Laboratories, Frederick, Md.) were used for all in vivo efficacy experiments. Animal subjects had free access to food (Teklad Global Soy Protein-Free Extruded Rodent Diet 2020X) and water and were maintained on a 12-h light/dark cycle for the entire duration of the study. All animals were housed on standard solid-bottomed caging with corn cob bedding with 1 animal per cage. The animal colony was maintained at approximately 21° C. and 60% humidity. All experiments were conducted in accordance with the International Association for the Study of Pain guidelines.

[0994] At test time, mice (n=12) were lightly restrained in a cloth glove and injected with 20 μL of CFA (Sigma Aldrich) into the intraplantar surface of the left hind paw using an insulin syringe (U100, 0.3 cc, 28-30G). Thermal latency to the Hargreaves apparatus (San Diego Instruments) was recorded 24 hours post CFA injection and again following investigational compound or vehicle administration. Following the thermal test both ipsilateral and contralateral paw widths were measured. After study completion animals were immediately euthanized.

[0995] The mouse CFA thermal hyperalgesia pain model (24 h postdose) in male CD-1 mice was run with a 5.0 mg/kg s.c. dose of [Glu20,Trp29]JzTx-V(1-29) (SEQ ID NO:112). After a lack of efficacy was observed at peptide doses ≦5 mg/kg in the formalin pain model, the peptide was tested in a second pain model. The peptide had no effect on thermal latency compared to vehicle (PBS). (See, FIG. 62). The positive control, a 30 mg/kg PO dose of mexilitine was sufficient to significantly reverse thermal hyperalgesia in the animals. The terminal plasma exposure (peptide plasma concentrations at 2 h post peptide injection) for the peptide was 1.75±0.536 μM. It is likely that the in vivo Nav1.7 target coverage was insufficient to produce efficacy in this pain model.

[0996] Mouse Open Field Analysis Experimental Protocol.

[0997] To verify that efficacy in the formalin model produced by a test compound is not due to sedation or damage to the animal, compounds were also tested for their effects on the overall movement of animals (open-field testing). Naïve animals are administered test compound and placed in a novel environment, and the movements the animal undergoes during exploration of the novel environment are automatically recorded. Reductions in movement of 50% or more mean that efficacy in the formalin test cannot be ascribed to true analgesia.

[0998] Male CD-1 mice (8-12 weeks of age, Harlan Laboratories, Frederick, Md.) were used for all in vivo efficacy experiments. Animal subjects had free access to food (Teklad Global Soy Protein-Free Extruded Rodent Diet 2020X) and water and were maintained on a 12-h light/dark cycle for the entire duration of the study. All animals were housed on standard solid-bottomed caging with corn cob bedding with 1 animal per cage. The animal colony was maintained at approximately 21° C. and 60% humidity. All experiments were conducted in accordance with the International Association for the Study of Pain guidelines.

[0999] On test day, animals were dosed with either an investigational compound or vehicle and given at least 30 minutes to acclimate to the testing room. Mice (N=10) were placed in a clean open field chamber (Kinder Scientific Photobeam Activity System) at the appropriate time after dose administration. The changes in overall animal movement were recorded on the system for 30 minutes under lights off conditions. The following parameters were evaluated: total basic movement, total rearing, total time rearing, and total fine movement.

[1000] Results of the Mouse Open Field Analysis.

[1001] [Glu20,Trp29]JzTx-V(1-29) (SEQ ID NO:112) at 0.1, 0.3, or 1.0 mg/kg s.c. doses with a 1-hour pre-treatment time had no effect on the total basic movement, total fine movement, total rearing, or total time rearing in CD-1 mice. None of these doses of peptide significantly decreased exploratory behavior in relation to the vehicle control. (See, FIG. 63 and FIG. 64). At a 5 mg/kg s.c. dose with a 1-hour pre-treatment, the peptide had no significant effect on the total basic movement of CD-1 mice relative to the vehicle. The peptide may have slightly reduced the total time rearing component of locomotor activity relative to the vehicle. (See, FIG. 65 and FIG. 66). Terminal exposures (peptide plasma concentrations at 2 h post-peptide injection) were 0.0248±0.00668, 0.121±0.0296, 0.419±0.226, and 4.73±0.584 μM for the 0.1, 0.3, 1.0, and 5.0 mg/kg s.c. doses, respectively. No observations were made at these doses and corresponding peptide plasma concentrations that would confound the experimental read out of the formalin or CFA pain models.

[1002] Rat Formalin Pain Model Experimental Procedure.

[1003] Formalin injection into a rodent paw evokes a well-studied form of pain quantitated by the number of times the animal flinches its paw. The pain following formalin injection comes in two characteristic phases: a first phase lasts approximately ten minutes and likely corresponds to the immediate pain mediated by peripheral neurons. The second phase, beginning approximately ten minutes after formalin injection and lasting for another 30 to 40 minutes, corresponds to sensitization of neurons in the spinal cord and hyperactivity of peripheral pain-sensing neurons. Compounds represented in this application were tested to see if they reduce the number of flinches in phase II of the formalin response and so are potential analgesic drugs (Bregman H et al., “Identification of a potent, state-dependent inhibitor of Nav1.7 with oral efficacy in the formalin model of persistent pain.” J Med Chem 54(13):4427-4445, 2011).

[1004] Male Sprague-Dawley rats (10-12 weeks of age, Harlan Laboratories, Frederick, Md.) were used for all in vivo efficacy experiments. Animal subjects had free access to food (Teklad Global Soy Protein-Free Extruded Rodent Diet 2020X) and water and were maintained on a 12-h light/dark cycle for the entire duration of the study. All animals were housed on standard solid-bottomed caging with corn cob bedding in groups of 2 animals per cage. The animal colony was maintained at approximately 21° C. and 60% humidity. All experiments were conducted in accordance with the International Association for the Study of Pain guidelines.

[1005] On test day, during or before acclimation, the animals were dosed with either an investigational compound or vehicle. Following dose administration, all rats (n=8) were conditioned to behavioral analysis chambers (dimensions: 15 cm diameter, 30 cm tall cylinder) for 30 minutes prior to the formalin injection. At test time, rats were lightly restrained in a towel and injected with 50 μL of a 2.5% formalin solution into the dorsal surface of the left hind paw using an insulin syringe (U100, 0.3 cc, 28-30G). A soft metal band (10 mm wide 3×27 mm long, shaped into a C, and weighing 0.5 g) was placed on the left hind paw and glued onto the animal being tested Immediately following the formalin injection, animals were returned to the chamber on the automated flinch-detecting system (T. Yaksh, University of California at San Diego, La Jolla, Calif.). Each animal's flinch count value over an interval of time (1 min), for the duration of the study (40 min), forms the data set used in all subsequent analyses. These data are averaged in the phase 1 and phase 2 formalin intervals after which ipsilateral and contralateral paw widths were measured. After study completion animals were immediately euthanized.

[1006] Rat Formalin Model Results.

[1007] [Glu20,Trp29]JzTx-V(1-29) (SEQ ID NO:112) was tested in the formalin pain model in male Sprague-Dawley rats with a 1-hour pre-treatment dose of 5.0 mg/kg s.c. After a lack of efficacy was observed at peptide doses <5 mg/kg in mice, the formalin pain model was repeated at a 5 mg/kg dose in a second species, Sprague-Dawley rats. The peptide had no effect in the first or acute phase (0-5 minutes post formalin injection). The peptide did not decrease and may have actually increased the time spent lifting and/or licking the affected paw during the second phase (5-40 minutes post formalin injection, associated with spinal sensitization) compared to vehicle (PBS). (See, FIG. 67 and FIG. 68). The positive control, a 2 mg/kg s.c. dose of morphine was sufficient to significantly reduce pain response in the animals. The terminal plasma exposure (peptide plasma concentrations at 45 min post-formalin injection) for the peptide was 1.18±0.156 μM. It is likely that the in vivo Nav1.7 target coverage at this peptide plasma concentration was insufficient to produce efficacy in this pain model.

[1008] Rat Open Field Analysis Experimental Protocol.

[1009] To verify that efficacy in the formalin model produced by a test compound is not due to sedation or damage to the animal, compounds were also tested for their effects on the overall movement of animals (open-field testing). Naïve animals are administered test compound and placed in a novel environment, and the movements the animal undergoes during exploration of the novel environment are automatically recorded. Reductions in movement of 50% or more mean that efficacy in the formalin test cannot be ascribed to true analgesia.

[1010] Male Sprague-Dawley rats (10-12 weeks of age, Harlan Laboratories, Frederick, Md.) were used for all in vivo efficacy experiments. Animal subjects had free access to food (Teklad Global Soy Protein-Free Extruded Rodent Diet 2020X) and water and were maintained on a 12-h light/dark cycle for the entire duration of the study. All animals were housed on standard solid-bottomed caging with corn cob bedding in groups of 2 animals per cage. The animal colony was maintained at approximately 21° C. and 60% humidity. All experiments were conducted in accordance with the International Association for the Study of Pain guidelines.

[1011] On test day, animals were dosed with either an investigational compound or vehicle and given at least 30 minutes to acclimate to the testing room. Rats (N=8) were placed in a clean open field chamber (Photobeam Activity System, San Diego Instruments) at the appropriate time after dose administration. The changes in overall animal movement were recorded on the system for 30 minutes under lights off conditions. The following parameters were evaluated: total basic movement, total rearing, total time rearing, and total fine movement.

[1012] Rat Open Field Analysis Results.

[1013] [Glu20,Trp29]JzTx-V(1-29) (SEQ ID NO:112) at a 5.0 mg/kg s.c. dose with a 1-hour pre-treatment time had no significant effect on the total basic movement or total rearing components of locomotor activity in male Sprague-Dawley rats. The dose of peptide did not significantly decrease exploratory behavior in relation to the vehicle control. (See, FIG. 69 and FIG. 70). Terminal exposure (peptide plasma concentrations at 2 h post peptide injection) was 0.994±0.184 μM for the 5.0 mg/kg s.c. dose.

[1014] The foregoing example of in vivo pain models for the screen of therapeutic embodiments of the inventive molecules are non-limiting. The skilled practitioner is aware of other relevant pain models.

### Example 9

### Site Specific Peptide Conjugation

[1015] The following protocol was used to site-specifically conjugate a dimeric toxin peptide analog (see, Table 5 for toxin peptide analog amino acid sequences) to a human immunoglobulin at a linkage site on the heavy chain (C273 of SEQ ID NO:542).

[1016] Preparation of Peptide-Linker Construct.

[1017] Alkyne-containing peptide Pra-[Nle6]JzTx-V(1-29) (SEQ ID NO:425) was subjected to copper catalyzed 1,3-dipolar cycloaddition with a Bis-{azido-PEG23-ethyl}-5-((2-bromoacetamido)methyl)isophthalamide to obtain the site-specifically PEGylated peptide dimer with triazole linkages, thus converting a propargylglycine or Pra residue in each sequence to a 3-(1,2,3-triazol-4-yl)alanine or Atz residue to yield Atz-[Nle6]JzTx-V (SEQ ID NO:571 as set forth in Table 5). (See, FIGS. 76A-B and FIG. 81A). Peptide containing propargylglycine (Pra) at the N-terminus (7.4 mM in 2.12 mL water), Bis-{azido-PEG23}-5-((2-bromoacetamido)methyl)isophthalamide (150 mM, 0.127 mL in water), tris((1-benzyl-1H-1,2,3-triazol-4-yl)methyl)amine (TBTA, 10 mM, 1.3 mL in DMSO), sodium ascorbate (50 mM, 5.1 mL in water), and copper (II) sulfate (35 mM, 0.8 mL in water) solutions were prepared fresh. Peptide and reagents were added in the following order to a 50 mL centrifuge tube to achieve the following final concentrations. Peptide stock solution (2.1 mL) was added for a final concentration of 3.7 mM, followed by addition of Bis-{azido-PEG23}-5-((2-bromoacetamido)methyl)isophthalamide (0.064 mL) for a final concentration of 2.25 mM. TBTA (0.191 mL) was added for a final concentration of 0.45 mM and mixed thoroughly. Sodium ascorbate (1.431 mL) was then added for a final concentration of 16.9 mM and mixed thoroughly. CuSO₄ (0.409 mL) was added for a final concentration of 3.4 mM. Additional peptide solution was added (0.4 mL of 7.4 mM stock) after 15 minutes. The solution was allowed to stand for 1 h at which time it was judged to be complete by LC-MS. The product mixture was purified by injecting onto a preparative HPLC column (Phenomenex Luna 5u C18(2) 100A AXIA, 250×30 mm) attached to a prep HPLC (Agilent), and the peptide was eluted with a 10-40% B gradient over 60 min, followed by a 10 min flush and a 10 min equilibration. The fractions were analyzed by LC-MS, pooled, and lyophilized to afford pure peptide-linker construct for conjugation to IgG or Fc domain. An analogous set of reactions was performed with appropriate peptide starting materials and linkers (i.e., {PEG11-ethyl}-bromoacetamide) to prepare other peptide-linker constructs with linkers attached at the N-terminus (SEQ ID NO:885), SEQ ID NO:571 and SEQ ID NO:893), position 1 (SEQ ID NO:1694), the side chain of lysine at position 14 (SEQ ID NO:892), and position 17 (SEQ ID NO:889). (See, Table 21).

[1018] Antibody Preparation/Reduction.

[1019] Anti-DNP mAb (E273C, hIgG1) (kappa/IgG1z) was concentrated to ˜5 mg/ml in reaction buffer (20 mM sodium phosphate pH 6.8, 2 mM EDTA).

[1020] The amino acid sequence of the human IgG heavy chain monomer that was used was the following (variable region is underlined; C273 linkage site is italicized and underlined):

SEQ ID NO.: 542
QVQLVESGGGVVQPGRSLRLSCAASGFTFSSYGMHWVRQAPGKGLEW
VAVIWYDGSNKYYADSVKGRFTISRDNSKNTLYLQMNSLRAEDTAVY
YCARYNFNYGMDVWGQGTTVTVSSASTKGPSVFPLAPSSKSTSGGTA
ALGCLVKDYFPEPVTVSWNSGALTSGVHTFPAVLQSSGLYSLSSVVT
VPSSSLGTQTYICNVNHKPSNTKVDKKVEPKSCDKTHTCPPCPAPEL
LGGPSVFLFPPKPKDTLMISRTPEVTCVVVDVSHEDPCVKFNWYVDG
VEVHNAKTKPREEQYNSTYRVVSVLTVLHQDWLNGKEYKCKVSNKAL
PAPIEKTISKAKGQPREPQVYTLPPSREEMTKNQVSLTCLVKGFYPS
DIAVEWESNGQPENNYKTTPPVLDSDGSFFLYSKLTVDKSRWQQGNV
FSCSVMHEALHNHYTQKSLSLSPGK//.

[1021] The amino acid sequence of the human IgG kappa light chain monomer that was used was the following (variable region is underlined):

SEQ ID NO.: 543
DIQMTQSPSSVSASVGDRVTITCRASQGISRRLAWYQQKPGKAPKLL
IYAASSLQSGVPSRFSGSGSGTDFTLTISSLQPEDFATYYCQQANSF
PFTFGPGTKVDIKRTVAAPSVFIFPPSDEQLKSGTASVVCLLNNFYP
REAKVQWKVDNALQSGNSQESVTEQDSKDSTYSLSSTLTLSKADYEK
HKVYACEVTHQGLSSPVTKSFNRGEC//.

[1022] The amino acid sequence of the human IgG1z Fc domain monomer that was used was the following (C52 linkage site is italicized and underlined):

SEQ ID NO.: 544
DKTHTCPPCPAPELLGGPSVFLFPPKPKDTLMISRTPEVTCVVVDVS
HEDPCVKFNWYVDGVEVHNAKTKPREEQYNSTYRVVSVLTVLHQDWL
NGKEYKCKVSNKALPAPIEKTISKAKGQPREPQVYTLPPSREEMTKN
QVSLTCLVKGFYPSDIAVEWESNGQPENNYKTTPPVLDSDGSFFLYS
KLTVDKSRWQQGNVFSCSVMHEALHNHYTQKSLSLSPGK//.

Alternative preferred conjugation sites within the human IgG heavy chain monomer, besides E273C in the CH2 domain, are E89C in the VH domain and T360C in the CH3 domain and the analogous site in the IgG1z Fc domain. Additional conjugation sites within the human IgG heavy chain monomer are A119C, S125C, E153C, D266C, Y301C, E346C, M359C, N362C, Q363C, E389C, N391C, D414C, S416C, and S443C and the analogous site E346C, N362C, Q363C, N391C, L399C, and D414C in the IgG1z Fc domain. An alternative preferred conjugation site within the human IgG kappa light chain monomer is D70C in the VL domain. Additional conjugation sites within the human IgG kappa light chain monomer are V110C or A112C. These sequences may (SEQ ID NO:1718-1740) or may not (SEQ ID NO:1741-1742) contain the N298G mutation in the IgG heavy chain monomer or IgG1z Fc domain.

TABLE 21
Immunoglobulin-JzTx-V peptide conjugates were made. (See FIG. 81B). Some of the “bivalent”
conjugate molecules actually had four toxin peptides (i.e., peptide dimer covalently
conjugated via linker to each Fc domain monomer in the molecule) in the molecule.

| | | | SEQ ID NOS | |
|---|---|---|---|---|
| | SEQ ID | | of immuno- | |
| | NO of | | globulin mono- | |
| | toxin | Linker and residue position of | mers in conju- | Monovalent |
| Designation | peptide | linkage on toxin peptide | gated molecule | or Bivalent |
| Immunoglobulin- | 571 | Bis-{PEG23-ethyl}-5-((2- | 542; 543; 542; | bivalent |
| Peptide Conjugate 1 | | bromoacetamido)methyl)isophthalamide | 543 | |
| | | at N-terminus [See, FIG. 78B] | | |
| Immunoglobulin- | 885 | Bis-{PEG23-ethyl}-5-((2- | 542; 543; 542; | Bivalent |
| Peptide Conjugate 2 | | bromoacetamido)methyl)isophthalamide | 543 | |
| | | at N-terminus | | |
| Immunoglobulin- | 889 | Bis-{PEG23-ethyl}-5-((2- | 542; 543; 542; | Bivalent |
| Peptide Conjugate 3 | | bromoacetamido)methyl)isophthalamide | 543 | |
| | | at Atz17 | | |
| Immunoglobulin- | 892 | Bis-{PEG23-ethyl}-5-((2- | 542; 543; 542; | Bivalent |
| Peptide Conjugate 4 | | bromoacetamido)methyl)isophthalamide | 543 | |
| | | at Lys(Atz)14 | | |
| Immunoglobulin- | 889 | Bis-{PEG23-ethyl}-5-((2- | 542; 543; 542; | Monovalent |
| Peptide Conjugate 5 | | bromoacetamido)methyl)isophthalamide | 543 | |
| | | at Atz17 | | |
| Immunoglobulin- | 885 | Bis-{PEG23-ethyl}-5-((2- | 542; 543; 542; | Monovalent |
| Peptide Conjugate 6 | | bromoacetamido)methyl)isophthalamide | 543 | |
| | | at N-terminus | | |
| Immunoglobulin- | 889 | {PEG 11-ethyl}-bromoacetamide at | 542; 543; 542; | Bivalent |
| Peptide Conjugate 7 | | Atz17 | 543 | |
| Immunoglobulin- | 885 | {PEG 11-ethyl}-bromoacetamide at | 542; 543; 542; | Bivalent |
| Peptide Conjugate 8 | | N-terminus | 543 | |
| Immunoglobulin- | 571 | {PEG 11-ethyl}-bromoacetamide at | 542; 543; 542; | Bivalent |
| Peptide Conjugate 9 | | N-terminus | 543 | |
| Immunoglobulin- | 892 | {PEG 11-ethyl}-bromoacetamide at | 542; 543; 542; | Bivalent |
| Peptide Conjugate 10 | | Lys(Atz)14 | 543 | |
| Immunoglobulin | 889 | {PEG 11-ethyl}-bromoacetamide at | 544; 544 | Bivalent |
| Fc-Peptide | | Atz17 | | |
| Conjugate 11 | | | | |
| Immunoglobulin | 889 | Bis-{PEG23-ethyl}-5-((2- | 544; 544 | Bivalent |
| Fc-Peptide | | bromoacetamido)methyl)isophthalamide | | |
| Conjugate 12 | | at Atz17 | | |
| Immunoglobulin | 889 | Bis-{PEG23-ethyl}-5-((2- | 544; 544 | Monovalent |
| Fc-Peptide | | bromoacetamido)methyl)isophthalamide | | |
| Conjugate 13 | | at Atz17 | | |
| Immunoglobulin | 892 | Bis-{PEG23-ethyl}-5-((2- | 544; 544 | Bivalent |
| Fc-Peptide | | bromoacetamido)methyl)isophthalamide | | |
| Conjugate 14 | | at Lys(Atz)14 | | |
| Immunoglobulin | 885 | Bis-{PEG23-ethyl}-5-((2- | 544; 544 | Bivalent |
| Fc-Peptide | | bromoacetamido)methyl)isophthalamide | | |
| Conjugate 15 | | at N-terminus | | |
| Immunoglobulin | 889 | Bis-{PEG23-ethyl}-5-((2- | 1741; 1741 | Monovalent |
| Fc-Peptide | | bromoacetamido)methyl)isophthalamide | (Table 5A) | |
| Conjugate 16 | | at Atz17 | | |
| Immunoglobulin- | 889 | Bis-{PEG23-ethyl}-5-((2- | 1742; 1695; | Monovalent |
| Peptide Conjugate 17 | | bromoacetamido)methyl)isophthalamide | 1742; 1695 | |
| | | at Atz17 | (Table 5A) | |
| Immunoglobulin- | 889 | Bis-{PEG23-ethyl}-5-((2- | 1743; 1744; | Monovalent |
| Peptide Conjugate 18 | | bromoacetamido)methyl)isophthalamide | 1743; 1744 | |
| | | at Atz17 | (Table 5A) | |
| Immunoglobulin- | 889 | (2S)-2-(2-(2-(2-(2- | 542; 543; 542; | Bivalent |
| Peptide Conjugate 19 | | bromoacetamido)acetamido)acetamido)- | 543 | |
| | | 3-hydroxypropanamido)butanamide | | |
| | | at Atz17 | | |
| Immunoglobulin- | 889 | {PEG 11-ethyl}-bromoacetamide at | 1743; 1744; | Bivalent |
| Peptide Conjugate 20 | | Atz17 | 1743; 1744 | |
| | | | (Table 5A) | |
| Immunoglobulin- | 893 | {PEG 11-ethyl}-bromoacetamide at | 542; 543; 542; | Bivalent |
| Peptide Conjugate 21 | | Atz17 | 543 | |
| Immunoglobulin- | 1694 | {PEG 11-ethyl}-bromoacetamide at | 542; 543; 542; | Bivalent |
| Peptide Conjugate 22 | | Atz1 | 543 | |

[1023] Experimental Procedure for Preparation of Immunoglobulin Peptide Conjugate 1 by Partial Reduction Method.

[1024] Reduction of engineered cysteines was done by incubating mAb with a 1:1 molar ratio of TCEP to cysteine (2:1 TCEP to mAb) at room temperature for 30 minutes. TCEP was removed using a Zeba spin desalting column (≧7 kD Pierce) equilibrated with reaction buffer. Large scale preps were concentrated to appropriate volume prior to loading using amicon ultra (10,000-30,000MWCO) centrifugal concentrators.

[1025] Peptide Preparation.

[1026] Lyophilized dimeric peptide-linker containing a bromoacetamide functionality was resuspended in water at 20 mg/ml immediately prior to conjugation reaction.

[1027] Conjugation Reaction.

[1028] Peptide dimer and reduced mAb were mixed at a 2.5:1 molar ratio of peptide dimer to cysteine (5:1 peptide to mAb) in reaction buffer at mAb concentration of 10 mg/ml and incubated for 12-16 hours at 4° C. The engineered free cysteines in the immunoglobulin react with the bromoacetamide functionality in peptide-linker to form a site-specific immunoglobulin-peptide conjugate with a stable thioacetamide linkage. (See, FIG. 79A-B, FIG. 81B and FIG. 81C). If one cysteine reacts, then the result is a monovalent immunoglobulin-peptide conjugate, and if both cysteines react, then the result is a bivalent immunoglobulin-peptide conjugate.

[1029] Purification of Conjugates.

[1030] Following incubation, conjugation reaction was desalted to removed excess free peptide and loaded onto a HiTrap SP-HP column (GE Healthcare; 1 ml column for preps <10 mg, 5 ml column for preps >10 mg). Column was rinsed in 5 column volumes of 90% buffer A (10 mM sodium phosphate pH 6.5, 5% ethanol) 10% buffer B (10 mM sodium phosphate pH 6.5, 5% ethanol, 1M NaCl). Conjugate (see, Table 21) was eluted over a 20 column volume gradient from 10% buffer B to 70% buffer B. Unmodified mAb elutes first followed by monvalent immunoglobulin-peptide conjugate (1 peptide per mAb), followed by bivalent immunoglobulin-peptide conjugate (2 peptides per mAb). Higher order conjugates resulting from over reduction of the mAb elute later. (See, FIG. 92A-B). Following purification, conjugates were formulated into A5SU storage buffer (10 mM sodium acetate pH 5.0, 9% sucrose) and concentrated to 10 mg/ml to be stored at −80° C.

[1031] Analysis of Conjugate.

[1032] Conjugate was run on reducing SDS-PAGE to confirm conjugation to heavy chain (increase in size by ˜10 kD) and non-reducing SDS-PAGE to confirm internal disulfides remained intact. (See, FIG. 93).

[1033] Specific Reaction Results.

[1034] From 15 mg of Anti-DNP mAb (E273C, hIgG1; SEQ ID NO:542; SEQ ID NO:543; SEQ ID NO:542; SEQ ID NO:543) and 7 mg of peptide-linker construct (“Homodimeric Peptide No. 1”, i.e., Bis-{Atz(PEG23*)-[Nle6]JzTx-V(1-29)}-5-(2-bromoacetamido)methyl)isophthalamide, see Example 5) were obtained 5 mg of bivalent conjugate (“Immunoglobulin Peptide Conjugate 1”, see Table 21). Sample was concentrated to 10 mg/mL in A5SU buffer and stored as aliquots at −80° C. Immunoglobulin Peptide Conjugate 1 was tested in the Nav1.7 and Nav1.4 PX assays and found to be potent against both channels with IC50 values of 0.2 nM for both targets. (See Table 13).

[1035] Preparation of Immunoglobulin Peptide Conjugate 3 by Redox Method.

[1036] The concentration of anti-DNP E273C IgG (107 mg, 0.73 μmol, 7.6 mL of a 14.06 mg/mL solution in A52Su buffer (10 mM sodium acetate, 9% (w/v) sucrose, pH 5.2)) was measured by UV absorbance (Nanodrop 1000 spectrophotometer, Thermo Scientific, 280 nM wavelength, extinction coefficient of 1.37) and diluted into reaction buffer (32.5 mL of 50 mM sodium phosphate, 2 mM EDTA, pH 7.5) in a sterile 50 mL centrifuge tube. Reduction was accomplished by adding 3 equivalents of TCEP per engineered cysteine (4.36 μmol, 1.1 mL of 4.0 mM solution in sterile water) to the IgG solution and incubating for 1 h at room temperature without stirring. Zeba desalting spin cartridges (10 mL, Thermo Scientific product#87772, 40K MWCO) were prepared for use by centrifuging once at 1000×g for 2 min to remove the storage solution, then washing twice with 5 mL of reaction buffer and centrifuging at 1000×g for 2 min each time, and finally washing with 5 mL of reaction buffer and centrifuging at 1000×g for 6 min. The reaction mixture was exchanged into reaction buffer using 10 desalt columns by adding 4 mL of solution to each previously prepared desalt column and centrifuging at 1000×g for 4 minutes to collect the samples, which were re-combined in a single sterile 50 mL centrifuge tube. To the solution of reduced IgG in reaction buffer was added a freshly prepared solution of dehydroascorbic acid (4.5 equivalents per engineered cysteine, 6.5 μmol, 1.6 mL of 4.0 mM solution in reaction buffer, Aldrich product#261556), and the reaction mixture was incubated for 15 min at room temperature. To the solution of re-oxidized IgG was added a solution of CyA-[Nle6,Atz(PEG11-bromoacetamide)17,Glu28]JzTx-V(1-29) (SEQ ID NO:888) (3 equivalents per engineered cysteine, 4.36 μmol, 1.7 mL of 2.5 mM solution in sterile water) to give a final volume of 42.9 mL (2.5 mg/mL IgG concentration). The reaction solution was incubated at room temperature for 18 h without stirring. Zeba desalting spin cartridges (10 mL, Thermo Scientific product#87772, 40K MWCO) were prepared for use by centrifuging once at 1000×g for 2 min to remove the storage solution, then washing twice with 5 mL of A52Su buffer (freshly filtered through a 0.22 μm filter) and centrifuging at 1000×g for 2 min each time, and finally washing with 5 mL of A52Su buffer and centrifuging at 1000×g for 6 min. The reaction mixture was exchanged into A52Su buffer using 11 desalt columns by adding 4 mL of solution to each desalt column and centrifuging at 1000×g for 4 minutes to collect the samples. The combined sample mixture was concentrated to 10 mL (˜10 mg/mL protein concentration) by centrifugal filtration by added equal volumes to 4 centrifugal concentrators (Amicon 15, 10 K, Millipore) and centrifuging at 4000×g for 15 min. The concentrated samples were re-combined and purified by strong cation ion exchange chromatography on an Agilent 1200 HPLC using a 5 mL HiTrap SP HP column (GE Healthcare, 17-1152-01) and eluting with a 0-20% B over 5 min, 20-50% B over 30 min, 100% B flush for 5 min, and 0% B re-equilibration for 10 min gradient (A buffer: 100 mM sodium acetate, pH 5.0 and B buffer: 100 mM sodium acetate, 1.2 M NaCl, pH 5.0) at a 5 mL/min flow rate with fraction collection by UV absorbance threshold (280 nM wavelength). Fractions containing the desired product were combined and dialyzed into A52Su buffer (250 mL Slide-A-Lyzer dialysis flask, 20K MWCO, Thermo Scientific product #87763, 3×3 L of A52Su buffer for 12 h, 4 h, and 3 h). The product mixture was concentrated to 6 mL by centrifugal filtration by added equal volumes to 4 centrifugal concentrators (Amicon 15, 10 K, Millipore) and centrifuging at 4000×g. The product mixture was sterilized by syringe filtration (MILLEX GP, 0.22 μM, Millipore). The concentration was determined by UV absorbance (10.49 mg/mL in 6.5 mL, 68.8 mg (60.5% yield), aliquots of the product were removed for analysis by SEC, HIC, LC/MS-TOF, endotoxin analysis, and SDS-PAGE gel electrophoresis as described below, and the product was frozen at −80° C. Analytical size exclusion chromatography (SEC) was performed on an Agilent 1260 Bioinert HPLC using a QC-PAK GFC 300 column (Tosoh Biosciences, 7.8 mm×15 cm, 5 μM) and eluting for 15 min with an isocratic method of 100% B buffer (0.17 M potassium phosphate monobasic, 0.21 M KCl, 15% (v/v) IPA, pH 7.0) at a 0.5 mL/min flow rate. SEC analysis (10 ug injection) revealed 96.9% monomer with 3.1% of higher molecular weight species (UV absorbance, 280 nM). (See, FIG. 165). Analytical hydrophobic interaction chromatography (HIC) was performed on an Agilent 1100 HPLC using a ProPac HIC-10 column (Dionex, 5 μM, 300 A, 4.6×100 mm) with a 0-100% B in 10 min with a 2 min flush and 3 min equilibration (A buffer: 20 mM sodium acetate, 1 M ammonium sulfate, pH 5 and B buffer: 20 mM sodium acetate, 10% acetonitrile, pH 5) at a 1.0 mL/min flow rate. HIC analysis (10 ug injection in 20 uL of A buffer) revealed 99% main peak (UV absorbance, 280 nM). Three samples were prepared for analysis. A 10 ug aliquot of the product was diluted to 25 uL with DPBS in a polypropylene LC sample vial, and 2 uL was injected into the LC/MS-TOF for the intact, non-deglycosylated sample. A 30 ug aliquot of the product was added to a 96 well polypropylene plate and diluted up to 24 uL with reaction buffer. PNGase F (2 uL, 5 U/mL, QA Bio) was added, and the solution was incubated at 37° C. for 18 h on a Torrey Pines heater/shaker (300 rpm). A 12 uL aliquot of the deglycosylated sample was removed for full TCEP reduction (vide infra). The remaining material was diluted with DPBS (12 uL) and LC/MS-TOF data was obtained from a 2 uL injection. An aliquot of the TCEP solution described above (12 uL) was added to the previously removed aliquot (12 uL) of the deglycosylated product. The solution was shaken in a Torrey Pines heater/shaker at 37° C. for 45 min (300 rpm), and the reduced, deglycosylated sample was analyzed by LC/MS-TOF. LC/MS-TOF analysis was performed on an Agilent 1290 HPLC with an Agilent 6224 TOF LC/MS using a PLRP-S column (1000 A, 5 μM, 2.1×50 mm, product# PL1912-1502) eluted with a 10-50% B over 10 min gradient (A buffer: water with 0.1% formic acid and B buffer: acetonitrile with 0.1% formic acid) at a flow rate of 0.8 mL/min. (See, FIG. 166A-C). Samples for SDS-PAGE gel electrophoresis were prepared in an Eppendorf tube (1.5 mL) by mixing product (0.5 uL of 10 mg/mL) with Novex tris-glycine SDS sample buffer (2×) (13 uL, Cat# LC2676), Nupage sample reducing agent (10X) (Cat# NP0004, Lot#1213695, 3 uL for reduced sample only) and DI water (9 uL for reduced sample and 12 uL for non-reduced sample). The mixtures were heated at 75° C. for 10 minutes, cooled, and 10 uL was added to the gel with MW standard SeeBlue plus2 (Cat# LC5925, Lot#1143316). The sample was developed for 1 h using an Invitrogen Powerease 500 (200V, 89 mA, 10 W). The gel was removed and stained with Coomassie Blue for 1 h, then washed with deionized water for 4 h, and imaged. (See, FIG. 167). For endotoxin analysis, a 25 ug aliquot of product was diluted to 125 uL at a 0.2 mg/mL using endotoxin-specific buffer (product code BG120, Lot# TFM5040) and tested on the Endosafe-MCS (Charles River) using the manufacturer's instructions. The endotoxin level was <0.25 EU/mg.

### Example 10

### Use of Multivalent Linkers to Prepare Toxin Peptide Analog Dimers

[1037] To increase the inventive toxin peptide analog's in vivo half-life, alter its distribution profile, and thus increase its in vivo Nav1.7 target coverage, we prepared IgG- and Fc-conjugates of Nav1.7 inhibitory peptides. (See, Murray et al., Potent and selective inhibitors of Nav1.3 and Nav1.7, WO 2012/125973 A2). However, the modest potency of these first peptide conjugates limited in vivo plasma concentrations to ˜1× the in vitro Nav1.7 IC50, a level of target coverage which was not been sufficient to achieve efficacy (data not shown).

[1038] In a parallel effort, dimerization was explored as a strategy to improve the potency of the Nav1.7 inhibitory peptides. Two peptide dimers with different linker lengths, 2000 and 500 Da polyethyleneglycol (PEG), were prepared and tested in the Nav1.7 PatchXpress® electrophysiology assays (Homodimeric Peptide No. 3 and Homodimeric Peptide No. 4). Although the IC₅₀ values of the two compounds were quite similar, the dimer with the longer linker was extremely slow to wash off of the target, if it ever did at all (see FIGS. 73-74). In Table 22 below, PEGylated versions of [Phe6,Atz13]GpTx-1(1-34) (DCLGFFRKCIPD[Atz]DKCCRPNLVCSRTHKWCKYVF-NH₂; SEQ ID NO:591) and [Ala5,Phe6,Atz13,Leu26,Arg28]GpTx-1 34 (DCLGAFRKCIPD[Atz]DKCCRPNLVCSRLHRWCKYVF-NH₂; SEQ ID NO:592) were used for comparison. This slower off-rate can be a very beneficial property for the inhibition of the target in vivo and demonstrates the importance of optimizing the linker length. These linkers were polydisperse bis-azido PEGs, and one alkyne-containing peptide was attached to each end via a copper-catalyzed 1,3-dipolar cycloaddition reaction to form a triazole (see, FIGS. 75A-B and FIGS. 76A-B). However, these linkers did not contain an orthogonal chemical handle for conjugation of the peptide dimer to a protein.

[1039] Multivalent linkers with various monodisperse PEG lengths (n=3, 7, 11, 23, 35) that incorporate a haloacetamide (Br or I) functionality for reaction with the side chain thiol of an engineered cysteine within an Fc or IgG to form a stable thioether/thioacetamide linker were designed and prepared (see, FIGS. 78A-B and FIG. 80A-B). A series of monovalent and divalent peptides and a conjugate have been prepared from the potent Nav1.7 inhibitory peptide Pra-[Nle6]JzTx-V (SEQ ID NO:425). We modified Pra-[Nle6]JzTx-V (SEQ ID NO:425) with a PEG11 linker (Atz(PEG11-benzylthioacetamide)-[Nle6]JzTx-V(1-29); SEQ ID NO: 427) and prepared the dimer of Pra-[Nle6]JzTx-V (SEQ ID NO:425) with a multivalent linker (Homodimeric Conjugate No. 1 and Homodimeric Conjugate No. 2, see Example 5), and the Anti-DNP mAb (E273C, hIgG1; SEQ ID NO:542; SEQ ID NO:543; SEQ ID NO:542; SEQ ID NO:543) conjugate of the dimeric peptide (i.e, Bis-{Atz(PEG23*)-[Nle6]JzTx-V(1-29)}-5-((2-bromoacetamido)methyl)isophthalamide, see Example 5) to yield Immunoglobulin Peptide Conjugate 1 (see, Table 21). (Table 13 and FIG. 81A-C). These constructs showed an increase in potency upon dimerization, and the conjugate of the dimer shows a 10-fold increase in potency relative to the previous IgG-peptide conjugate. The linker structure in FIG. 78A-B demonstrated great utility for the preparation of multivalent conjugates comprising the inventive toxin peptide analogs. Additional dimeric peptide linkers were prepared to vary the attachment site of the linker within the peptide and the Nav1.4 selectivity of the peptide scaffold. Analogs were prepared with an amine functionality for assay and with the bromoacetamide functionality for conjugation. (See, Table 22).

TABLE 22
Nav1.7 PX analysis of Homodimeric JzTx-V and GpTx-1 peptide analogs.

| Designation | | SEQ | | Nav1.7 | |
|---|---|---|---|---|---|
| (see, | | ID | | PX IC50 | Wash |
| Example 5) | Peptide | NO: | Linker | (μM) | out |
| Homodimeric | Atz-[Nle6]JzTx-V(1-29) | 572 | Bis-PEG23- | | |
| Peptide No. 1 | | | bromoacetamide | | |
| Homodimeric | Atz-[Nle6]JzTx-V(1-29) | 572 | Bis-PEG23- | 0.000241 | No |
| Peptide No. 2 | | | benzylthioacetamide | | |
| Homodimeric | [Phe6,Atz13]GpTx-1(1-34) | 591 | 2000 Da PEG | 0.013 | No |
| Peptide No. 3 | | | | | |
| Homodimeric | [Phe6,Atz13]GpTx-1(1-34) | 591 | 500 Da PEG | 0.019 | Yes |
| Peptide No. 4 | | | | | |
| Homodimeric | [Ala5,Phe6,Atz13,Leu26,Arg28]GpTx- | 592 | 2000 Da PEG | 0.091 | Yes |
| Peptide No. 5 | 1(1-34) | | | | |
| Homodimeric | Atz-[Nle6]JzTx-V(1-29) | 572 | Bis-PEG23- | 0.000414 | No |
| Peptide No. 6 | | | amine | | |
| Homodimeric | Atz-[Nle6,Glu28]JzTx-V(1- | 885 | Bis-PEG23- | 0.002121 | No |
| Peptide No. 7 | 29) | | amine | | |
| Homodimeric | CyA- | 889 | Bis-PEG23- | 0.000679 | No |
| Peptide No. 8 | [Nle6,Atz17,Glu28]JzTx- | | amine | | |
| | V(1-29) | | | | |
| Homodimeric | CyA- | 892 | Bis-PEG23- | 0.001319 | No |
| Peptide No. 9 | [Nle6,Lys(Atz)14,Glu28]JzTx- | | amine | | |
| | V(1-29) | | | | |
| Homodimeric | Atz-[Nle6,Glu28]JzTx- | 885 | Bis-PEG23- | | |
| Peptide No. 11 | V(1-29) | | bromoacetamide | | |
| Homodimeric | CyA- | 889 | Bis-PEG23- | | |
| Peptide No. 12 | [Nle6,Atz17,Glu28]JzTx- | | bromoacetamide | | |
| | V(1-29) | | | | |
| Homodimeric | CyA- | 892 | Bis-PEG23- | | |
| Peptide No. 13 | [Nle6,Lys(Atz)14,Glu28]JzTx- | | bromoacetamide | | |
| | V(1-29) | | | | |

[1040] Experimental Methods.

[1041] The following series of reactions ((III)-(XI)) was conducted.

[chemical structure]

[1042] Benzene-1,3,5-tricarboxylic acid (50 g, 238 mmol) was dissolved in MeOH, and then conc. sulfuric acid (12.68 mL, 238 mmol) was slowly added. The solution became clear after 30 minutes of reflux and was left stirring at 72° C. for overnight. Solvent was removed under reduced pressure, the residue was dissolved in chloroform (2×800 mL) and washed with NaHCO3, then the organic solvent was removed in vacuo. (60 g, 100% yield).

[chemical structure]

[1043] The trimethyl benzene-1,3,5-tricarboxylate (62 g, 246 mmol) was dissolved in MeOH (800 mL), aq. sodium hydroxide (221 mL, 221 mmol)-(1N) was slowly added. The suspension was stirred vigorously and slowly dissolved during 8 hours. The reaction was left stirred at room temperature for 18 hours, then the solvent was removed in vacuo.

[1044] DCM (600 mL) was added to the solid and the organic phase was washed with sat. NaHCO₃ (3×500 mL) ˜3 layers in the separation funnel—solution was filtered and solid on the funnel was rinsed with DCM. The LC-MS of the crude confirmed that MW was of the desired product (MW:238; 48.8 g; yield 83%). The LC-MS analysis of material from the organic layer showed a mixture of the desired product as well as over-hydrolyzed product (MW: 224; 9 g), and analysis of material from the aqueous layer showed start material.

[chemical structure]

[1045] 3,5-bis(methoxycarbonyl)benzoic acid (10 g, 42.0 mmol) was dissolved in dry THF (80 mL). The flask was placed in ice-bath and bh3.thf (84 mL, 84 mmol) was added slowly (some bubbling occurred). The reaction mixture was left stirring at room temperature for 24 hours. After 14 hours reaction did not progress, another 3 eq. of bh3.thf (42.0 mL, 42.0 mmol) were slowly added and the reaction mixture was stirred at room temperature for hours. The reaction was completed (˜95% by LC-MS).

[1046] The reaction mixture was quenched with MeOH (added slowly ˜80 mL) and left stirred for 1 hour at RT. The solvent was removed in vacuo. The product was re-dissolved in EtOAc (white solution ˜1000 mL) and the organic layer was washed with water (2×800 mL), sat. NaHCO₃ (800 mL) and brine (800 mL). The EtOAc was dried with MgSO₄, filtered and concentrated in vacuo (3.62 g; yield 38.5%).

[chemical structure]

[1047] The dimethyl 5-(chloromethyl)isophthalate (5.69 g, 23.45 mmol) was dissolved in acetone (90 mL) and water (30 mL). Sodium azide (9.15 g, 141 mmol) was added as a last reagent and the solution was refluxed for 14 hours. After 14 hours the reaction was completed by LC-MS monitoring.

[1048] The reaction mixture was cooled down to room temperature and then concentrated in vacuo, the residue was re-dissolved in CHCl₃ (250 mL) and the organic layer was washed with water (3×200 mL) and brine (200 mL). The organic layer was then dried over MgSO₄, filtered and concentrated in vacuo (5.34 g; yield 91%).

[chemical structure]

[1049] The dimethyl 5-(azidomethyl)isophthalate (1.5 g, 6.02 mmol) was dissolved in 40 mL of diethyl ether (40 mL). Tri-n-butylphosphine (1.654 mL, 6.62 mmol) was added slowly and the reaction mixture was stirred for 45 minutes at room temperature and then frozen to −50° C. The solution of di-tert-butyl dicarbonate (1.417 mL, 6.62 mmol) in ether (20 mL) was slowly added (˜10 min) and the reaction mixture was stirred at −50° C. for 1 hour and then quenched with saturated NaHCO₃ (20 mL). The reaction mixture was then extracted with ether. Organic phase was dried with MgSO₄, filtered and concentrated in vacuo. Sample was dissolved in a mixture of DCM and MeOH, sillica gel was added, and it was concentrated in vacuo until dry. Automated normal phase purification was performed: 0-30 min. 0-30% of EtOAc in Hexanes. All fractions were collected and analyzed by LC-MS and TLC to identify desired product; concentrated in vacuo, used directly in the next step of the synthesis (760 mg; yield 75%).

[chemical structure]

[1050] A solution of dimethyl 5-(((tert-butoxycarbonyl)amino)methyl)isophthalate (830 mg, 2.57 mmol) in MeOH (40 ml) was treated with lithium hydroxide (984 mg, 41.1 mmol) previously dissolved with water (20 mL). The reaction mixture was stirred at 45° C. for 6 hours. After 6 hours the starting material was completely consumed. MeOH from the reaction solution was evaporated in vacuo and the aqueous layer was extracted with ether (50 mL). The aqueous layer was then acidified with an aqueous solution of HCl (2M) at 0° C. until pH 3-4 was reached and precipitation of the desired product occurred. Sample was filtered through a paper filter and washed twice with ether (10 mL). Sample was dried in air. (570 mg; yield 75%).

[chemical structure]

[1051] To a solution of 5-(((tert-butoxycarbonyl)amino)methyl)isophthalic acid (59.1 mg, 0.200 mmol) in dimethylformamide (DMF), 2-(7-Aza-1H-benzotriazole-1-yl)-1,1,3,3-tetramethyluronium hexafluorophosphate (HATU, 168 mg, 0.441 mmol) was added, the reaction mixture was stirred for 10 min. at room temperature, followed by Azido-dPEG11-amine (400 mg, 0.701 mmol) addition (20 minutes stirring) and N-ethyl-N-isopropylpropan-2-amine (0.116 ml, 0.701 mmol) addition. The reaction mixture was left at room temperature with stirring. The reaction was monitored on LC-MS, after 14 hours desired product was observed, nearly 95% by LC-MS. Sample was taken to purification directly: Gilson, Prep HPLC, 10 min. run time; 10-90% acetonitrile (ACN) in water, collect all, 254 nm); fractions were collected and concentrated in GeneVac overnight at 30° C. (158 mg; yield 56%).

[chemical structure]

[1052] To Reactant 1 (192.4 mg, 0.137 mmol) HCl in 1,4 Dioxane (3 mL) was added; the reaction mixture was stirred for 60 min. at room temperature. Sample was monitored on LC-MS and after 1 hour desired product was observed, nearly 98% by LC-MS. Sample was concentrated in vacuo and purified on Prep HPLC, 15 min. 10-90% ACN in water; 254 nm). Fractions were collected and dried in Genevac for 18 hours at 30° C. (127 mg; yield 71%).

[chemical structure]

[1053] To a solution of Reactant 2 (50 mg, 0.038 mmol) and dicyclohexylcarbodiimde (23.80 mg, 0.115 mmol) in dichloromethane was added bromoacetic acid (21.37 mg, 0.154 mmol). The reaction mixture was stirred for 2.5 hours, and sample mixture was concentrated in vacuo then redisolved in DMF/MeOH mixture (50:50 v/v). White material crushed out and it was filtered via 0.45 μm filter. The clear solution was injected directly to Prep HPLC Gilson (10-90% ACN in water in 10 min., collect all, 254 nm). The fractions were dried in GeneVac for 18 hours at 40° C., and the fractions were characterized by H-NMR and LC-MS (12.6 mg; yield 23%).

[1054] A similar reaction scheme ((XII)-(XIV)) was employed with Azido-dPEG23-amine instead of Azido-dPEG11-amine to provide the divalent bifunctional linker that was used to prepare Homodimeric Conjugate No. 1 (see, Example 5) and then Immunoglobulin Peptide Conjugate 1 (see, Example 9).

[chemical structure]

[1055] A suspension of 5-(((tert-butoxycarbonyl)amino)methyl)isophthalic acid (150 mg, 0.508 mmol) in DCM (5 mL) was treated with 1-chloro-N,N,2-trimethylprop-1-en-1-amine (Aldrich, 0.155 mL, 1.168 mmol). The reaction was stirred at 23° C. under nitrogen. After 1 h 15 min, the reaction was concentrated and dried under vacuum. The crude acid chloride was dissolved in DCM (5 mL), and treated with azido-PEG23-amine (Quanta BioDesign, 1675 mg, 1.524 mmol) and triethylamine (0.354 mL, 2.54 mmol) was then added in dropwise fashion. The reaction was stirred under nitrogen at 23° C., and subsequently concentrated after 4 h and dried under vacuum. The crude mixture was dissolved in 30% MeCN/water (3 mL) and filtered through a Whatman 0.45 μm filter, and purified on HPLC using a Phenomenex Synergi 4 μm MAX-RP 80 Å 250×30 mm column and a gradient: 10-55% MeCN/water+0.1% TFA in 35 min @ 30 ml/min flow rate (5 runs of 1.5 mL each). The pooled fractions were frozen and lyophilized over 60 h to afford a colorless semi-solid that was characterized by H-NMR and LCMS (675 mg; yield 54%).

[chemical structure]

[1056] A solution of Reactant 1 (0.675 g, 0.275 mmol) in hydrogen chloride, 4.0 m solution in 1,4-dioxane (10.30 ml, 41.2 mmol) was stirred at 23° C. After 19 h, the reaction mixture was concentrated and dried under vacuum affording a white solid. It was dissolved in 5 ml water and converted to a free base using VariPure IPE® carbonate resin. The resin (˜400 mg) was conditioned in a column with methanol (6 mL), followed by water (6 mL). The product HCL salt in water was applied and the flow through was collected. The column was washed with water (3×6 mL) and the filtrates were combined with the initial flow through and frozen. The solid was lyophilized to a white fluffy solid (580 mg; yield 90%).

[chemical structure]

[1057] A solution of Reactant 2 (580 mg, 0.246 mmol) in DCM (5 mL) was cooled to 0° C. under nitrogen and was treated with n,n-diisopropylethylamine (0.107 mL, 0.615 mmol), followed by bromacetyl bromide (0.027 mL, 0.307 mmol). The reaction was stirred at 0° C. LCMS at 20 min showed complete reaction to product. The solvent was removed under reduced pressure and the reaction was dried under vacuum. The crude mixture was dissolved in 30% MeCN/water (8 mL) and filtered through a Whatman 0.45 μm filter, and purified via HPLC using a Phenomenex Synergi 4 μm MAX-RP 80 Å 250×30 mm column and a gradient: 10-55% MeCN/water+0.1% TFA in 35 min @ 30 ml/min flow rate (4 runs of 2 mL each). The pooled fractions were frozen and lyophilized over the weekend to afford a light brown semi-solid characterized by H-NMR and LC-MS (355 mg; yield 58%).

### Example 11

### Site Specific Peptide Conjugation to Human Serum Albumin

[1058] The following protocol was used to site-specifically conjugate toxin peptide analogs (see, Table 5 for toxin peptide analog amino acid sequences and Table 22 for homodimeric toxin peptide analogs) to a human serum albumin (HSA) at the free sulfhydryl of a cysteine residue (C34 of SEQ ID NO:594). Peptide-linker constructs were prepared as described in Example 9 (monomeric) and Example 10 (dimeric).

[1059] The amino acid sequence of the human serum albumin that was used was the following (C34 linkage site is italicized and underlined):

SEQ ID NO.: 594
DAHKSEVAHRFKDLGEENFKALVLIAFAQYLQQCPFEDHVKLVNEVT
EFAKTCVADESAENCDKSLHTLFGDKLCTVATLRETYGEMADCCAKQ
EPERNECFLQHKDDNPNLPRLVRPEVDVMCTAFHDNEETFLKKYLYE
IARRHPYFYAPELLFFAKRYKAAFTECCQAADKAACLLPKLDELRDE
GKASSAKQRLKCASLQKFGERAFKAWAVARLSQRFPKAEFAEVSKLV
TDLTKVHTECCHGDLLECADDRADLAKYICENQDSISSKLKECCEKP
LLEKSHCIAEVENDEMPADLPSLAADFVESKDVCKNYAEAKDVFLGM
FLYEYARRHPDYSVVLLLRLAKTYETTLEKCCAAADPHECYAKVFDE
FKPLVEEPQNLIKQNCELFEQLGEYKFQNALLVRYTKKVPQVSTPTL
VEVSRNLGKVGSKCCKHPEAKRMPCAEDYLSVVLNQLCVLHEKTPVS
DRVTKCCTESLVNRRPCFSALEVDETYVPKEFNAETFTFHADICTLS
EKERQIKKQTALVELVKHKPKATKEQLKAVMDDFAAFVEKCCKADDK
ETCFAEEGKKLVAASQAALGL//.

[1060] Preparation of Human Serum Albumin Peptide Conjugates.

[1061] Human serum albumin (HSA, SEQ ID NO:594; 100 uL of 10% w/v, 10 mg, 149 μmol, AlbIX, Novozymes Biopharma) was diluted into reaction buffer (3.8 mL of 50 mM sodium phosphate, 60 mM sodium caprylate, 2 mM EDTA, pH 7.5) in a sterile 15 mL centrifuge tube. To the solution of HSA was added a solution of CyA-[Nle6,Atz(PEG11-bromoacetamide)17,Glu28]JzTx-V(1-29) (SEQ ID NO:888) (3 equivalents, 450 μmol, 90 uL of 5.0 mM solution in sterile water) to give a final volume of 4 mL (2.5 mg/mL HSA concentration). The reaction solution was incubated at 37° C. for 18 h without stirring. A Zeba desalting spin cartridge (10 mL, Thermo Scientific product#87772, 40K MWCO) was prepared for use by centrifuging once at 1000×g for 2 min to remove the storage solution, then washing twice with 5 mL of HIC A buffer (20 mM sodium phosphate, 5 mM sodium caprylate, 1 M ammonium sulfate, pH 7.0) (freshly filtered through a 0.22 μm filter) and centrifuging at 1000×g for 2 min each time, and finally washing with 5 mL of HIC A buffer and centrifuging at 1000×g for 6 min. The reaction mixture was exchanged into HIC A buffer by adding the 4 mL of reaction mixture to the freshly prepared desalt column and centrifuging at 1000×g for 4 minutes to collect the exchanged sample. The sample mixture was concentrated to 2.5 mL by centrifugal filtration using a centrifugal concentrator (Amicon 4, 10K MWCO, Millipore) and centrifuging at 4000×g for 10 min. The concentrated sample was purified by hydrophobic interaction chromatography (HIC) on an Agilent 1200 HPLC using a 5 mL HiTrap Butyl HP column (GE Healthcare) and eluting with a 0-100% B over 50 min gradient (A buffer: 20 mM sodium phosphate, 5 mM sodium caprylate, 1 M ammonium sulfate, pH 7.0 and B buffer: 20 mM sodium phosphate, 5 mM sodium caprylate, pH 7.0) at a 5 mL/min flow rate with fraction collection by UV absorbance threshold (280 nM wavelength). Fractions containing the desired product were combined and concentrated to ˜2 mL by centrifugal filtration using a centrifugal concentrator (Amicon 15, 10K MWCO, Millipore) and centrifuging at 4000×g. A Zeba desalting spin cartridge (5 mL, Thermo Scientific, 40K MWCO) was prepared for use by centrifuging once at 1000×g for 2 min to remove the storage solution, then washing twice with 2.5 mL of phosphate buffer (20 mM sodium phosphate, pH 7.0) and centrifuging at 1000×g for 2 min each time, and finally washing with 2.5 mL of phosphate buffer and centrifuging at 1000×g for 4 min. The reaction mixture was exchanged into phosphate buffer by adding the 2 mL of reaction mixture to the freshly prepared desalt column and centrifuging at 1000×g for 3 minutes to collect the exchanged sample. The product was further concentrated to ˜0.5 mL by centrifugal filtration using a centrifugal concentrator (Amicon 4, 10K MWCO, Millipore) and centrifuging at 4000×g. The concentration was determined by UV absorbance (Nanodrop 1000 spectrophotometer, Thermo Scientific, 280 nM wavelength, extinction coefficient of 0.667) to be 11.8 mg/mL for 50 uL, 5.3 mg (51% yield), and aliquots of the product were removed for analysis by SEC, LC/MS-TOF, and SDS-PAGE gel electrophoresis as described below, and the product, HSA-Peptide Conjugate 1 (see, Table 23) was stored at 4° C.

[1062] Analytical size exclusion chromatography (SEC) was performed on an Agilent 1260 Bioinert HPLC using a QC-PAK GFC 300 column (Tosoh Biosciences, 7.8 mm×15 cm, 5 μM) and eluting for 15 min with an isocratic method of 100% B buffer (0.17 M potassium phosphate monobasic, 0.21 M KCl, 15% (v/v) IPA, pH 7.0) at a 0.5 mL/min flow rate. SEC analysis (10 ug injection) revealed 98.8% monomer with the remaining 1.2% being higher MW species (UV absorbance, 280 nM). (See, FIG. 168A-B). A 10 ug aliquot of the product was diluted to 25 uL with DPBS in a polypropylene LC sample vial, and 2 uL was injected into the LC/MS-TOF. LC/MS-TOF analysis was performed on an Agilent 1290 HPLC with an Agilent 6224 TOF LC/MS using a PLRP-S column (1000 A, 5 nm, 2.1×50 mm, product# PL1912-1502) eluted with a 10-50% B over 10 min gradient (A buffer: water with 0.1% formic acid and B buffer: acetonitrile with 0.1% formic acid) at a flow rate of 0.8 mL/min. (See, FIG. 169A-B). Samples for SDS-PAGE gel electrophoresis were prepared in an Eppendorf tube (1.5 mL) by mixing product (0.5 uL of 10 mg/mL) with Novex tris-glycine SDS sample buffer (2X) (13 uL, Cat# LC2676) and DI water (12 uL). The mixtures were heated at 75° C. for 10 minutes, cooled, and 10 uL was added to the gel with MW standard SeeBlue plus2 (Cat# LC5925, Lot#1143316). The sample was developed for 1 h using an Invitrogen Powerease 500 (200V, 89 mA, 10 W). The gel was removed and stained with Coomassie Blue for 1 h, then washed with deionized water for 4 h, and imaged. (See, FIG. 170).

[1063] An analogous protocol was employed using Homodimeric Peptide No. 12 to prepare HSA-Peptide Conjugate 2 (see, Table 23), which bears two copies of toxin peptide per HSA. Both HSA-peptide conjugates were tested in the hNav1.7 PX assay and found to have Nav1.7 inhibitory activity.

TABLE 23
Two human serum albumin (HSA)-JzTx-V peptide conjugates were
made and tested in the hNav1.7 PX assay. (See Figure).

| | | | SEQ ID NOS | |
|---|---|---|---|---|
| | SEQ ID | | of human | |
| | NO of | | serum albumin | Nav1.7 |
| | toxin | Linker and residue position of | in conjugated | PX IC50 |
| Designation | peptide | linkage on toxin peptide | molecule | (μM) |
| HSA-Peptide | 889 | {PEG11-ethyl}-bromoacetamide at | 594 | 2.618 |
| Conjugate 1 | | Atz17 | | |
| HSA-Peptide | 889 | Bis-{PEG23-ethyl}-5-((2- | 594 | 0.0729 |
| Conjugate 2 | | bromoacetamido)methyl)isophthalamide | | |
| | | at Atz17 | | |

### Example 12

### Action Potential Firing in Saphenous Nerve Skin Preparation

[1064] The following protocol was used to test the block of action potential firing by CyA-[Nle6,Pra17,Glu28]JzTx-V(1-29) (SEQ ID NO:395) in a saphenous nerve skin preparation. (See Lennertz R C, Kossyreva, E A, Smith A K, Stucky C L (2012) TRPA1 Mediates Mechanical Sensitization in Nociceptors during Inflammation. PLOS ONE 7 (8), 1-11). Male C57B1/6 mice (2-4 months old) were euthanized via cervical dislocation under Na⁺-pentobarbital anesthesia (150 mg/kg; i.p.). Methods for isolating and recording from the saphenous nerve-skin preparation were modified from those previously described (Lennertz et al 2012). Briefly, the saphenous nerve and skin from the medial dorsum of the hindpaw were rapidly dissected, mounted in a custom made organ bath chamber with the corium side up, and bath superfused at speed 15 ml/min with 32° C. and oxygen-saturated synthetic interstitial fluid containing the following (in mM): 123 NaCl, 4 KCl, 0.7 MgSO₄, 1 NaH₂PO₄, 2.0 CaCl₂, 9.5 sodium gluconate, 10 glucose, 7.5 sucrose, and 10 HEPES, osmolarity 295 mOsm, pH 7.40 adjusted with NaOH. The proximal end of the saphenous nerve was passed through a hole into a separate, mineral-oil-filled recording chamber, desheathed, and teased into single fiber for extracellular recordings. Single fiber receptive fields in skin were detected by light pressure with a blunt glass rod. Fiber type was determined by action potential conductance velocity following receptive field electrical stimulation with square wave pulses (0.3-0.5 ms; 4-6 mA) delivered through a stainless steel microelectrode. Fibers with a conduction velocity less than 1.2 m/s were classified as C-fibers. Mechanical responses were evoked by square waves of 150 mN force using a mechanical stimulator (Dual-Mode Lever Systems, Aurora Scientific Inc., Canada). After a control period of 10 minutes, compound pre-warmed to 32° C. was applied to the receptive field in a stainless steel ring (inner diameter 5.25 mm and height 12 mm) and mechanical responses were evaluated every 5 minutes for 25 minutes (10 seconds per force application). Signals were recorded by a Neurolog system (Digitimer, UK) and Spike 2 software (Cambridge Electronic Design Ltd, UK) for off-line analysis. Action potentials were discriminated and counted using spike histogram software in Spike 2. All recordings and analysis were performed blinded to compound treatment.

[1065] The saphenous nerve skin preparation was used to evaluate the effect of CyA-[Nle6,Pra17,Glu28]JzTx-V(1-29) (SEQ ID NO:395) on mechanically-induced action potential firing from C-fibers in C57B1/6 mice. A concentration of 1.6 μM SEQ ID NO:395, equivalent to 100-fold the IC50 value in native TTX-S currents in DRG neurons, was applied to a small area of the skin using a small metallic cylinder and action potential firing following application of 150 mN force was evaluated every five minutes for 25 minutes. At the end of this time, 1 μM TTX was applied to block TTX-sensitive action potential firing. As shown in FIG. 171, 1.6 μM SEQ ID NO:395 blocked action potential firing by an average of over 60% whereas TTX completely blocked action potential firing. FIG. 172 illustrates that some C-fibers are fully blocked whereas other C-fibers are not or only weakly blocked by 1.6 μM SEQ ID NO:395. C-fibers that are poorly blocked or not blocked may be attributable to fibers being deeper in the skin and less accessible to SEQ ID NO:395 or to C-fibers that do not express Nav1.7 channels but other TTX-S sodium channels.

### Abbreviations

[1066] Abbreviations used throughout this specification are as defined below, unless otherwise defined in specific circumstances.
[1067] 5-C1W 5-Chlorotryptophan
[1068] 5-BrW 5-Bromotryptophan
[1069] 6-BrW 6-Bromotryptophan
[1070] 6-MeW 6-Methyltryptophan
[1071] 7-BrW 7-Bromotryptophan
[1072] 2-BrhF 2-Bromohomophenylalanine
[1073] 2-C1hF 2-Chlorohomophenylalanine
[1074] 2-FhF 2-Fluorohomophenylalanine
[1075] 2-MehF 2-Methylhomophenylalanine
[1076] 2-MeOhF 2-Methoxyhomophenylalanine
[1077] 3-BrhF 3-Bromohomophenylalanine
[1078] 3-C1hF 3-Chlorohomophenylalanine
[1079] 3-FhF 3-Fluorohomophenylalanine
[1080] 3-MehF 3-Methylhomophenylalanine
[1081] 3-MeOhF 3-Methoxyhomophenylalanine
[1082] 4-BrhF 4-Bromohomophenylalanine
[1083] 4-C1hF 4-Chlorohomophenylalanine
[1084] 4-FhF 4-Fluorohomophenylalanine
[1085] 4-Me-F 4-Methylphenylalanine
[1086] 4-MehF 4-Methylhomophenylalanine
[1087] 4-MeOhF 4-Methoxyhomophenylalanine
[1088] 4tBu-F 4-tert-butyl-phenylalanine
[1089] Ac acetyl (used to refer to acetylated residues)
[1090] AcBpa acetylated p-benzoyl-L-phenylalanine
[1091] ACN acetonitrile
[1092] AcOH acetic acid
[1093] ADCC antibody-dependent cellular cytotoxicity
[1094] Aib aminoisobutyric acid
[1095] bA beta-alanine
[1096] BhPra bishomopropargylglycine
[1097] Bpa p-benzoyl-L-phenylalanine
[1098] BrAc bromoacetyl (BrCH₂C(O)
[1099] BSA Bovine serum albumin
[1100] Bzl Benzyl
[1101] Cap Caproic acid
[1102] CBC complete blood count
[1103] Cha Cyclohexylalanine
[1104] CNS central nervous system
[1105] COPD Chronic obstructive pulmonary disease
[1106] CTL Cytotoxic T lymphocytes
[1107] DCC Dicylcohexylcarbodiimide
[1108] DCM dichloromethane
[1109] Dde 1-(4,4-dimethyl-2,6-dioxo-cyclohexylidene)ethyl
[1110] DMF dimethylformamide
[1111] DOPC 1,2-Dioleoyl-sn-Glycero-3-phosphocholine
[1112] DOPE 1,2-Dioleoyl-sn-Glycero-3-phosphoethanolamine
[1113] DPBS Dulbecco's phosphate-buffered saline
[1114] DPPC 1,2-Dipalmitoyl-sn-Glycero-3-phosphocholine
[1115] DRG dorsal root ganglion
[1116] DSPC 1,2-Distearoyl-sn-Glycero-3-phosphocholine
[1117] DTT Dithiothreitol
[1118] EAE experimental autoimmune encephalomyelitis
[1119] ECL enhanced chemiluminescence
[1120] EPA 4-ethynylphenylalanine
[1121] ESI-MS Electron spray ionization mass spectrometry
[1122] Et ethyl
[1123] FACS fluorescence-activated cell sorting
[1124] Fmoc fluorenylmethoxycarbonyl
[1125] H-NMR proton-nuclear magnetic resonance
[1126] HATU 2-(7-Aza-1H-benzotriazole-1-yl)-1,1,3,3-tetramethyluronium
[1127] hexafluorophosphate
[1128] HOBt 1-Hydroxybenzotriazole
[1129] HPLC high performance liquid chromatography
[1130] hPra homopropargylglycine
[1131] HSA human serum albumin
[1132] HSL homoserine lactone
[1133] IB inclusion bodies
[1134] IWQ IonWorks® Quattro
[1135] KCa calcium-activated potassium channel (including IKCa, BKCa, SKCa)
[1136] KLH Keyhole Limpet Hemocyanin
[1137] Ky voltage-gated potassium channel
[1138] Lau Laurie acid
[1139] LPS lipopolysaccharide
[1140] LC-MS liquid chromatography-mass spectrometry
[1141] LYMPH lymphocytes
[1142] MALDI-MS Matrix-assisted laser desorption ionization mass spectrometry
[1143] Me methyl
[1144] MeO methoxy
[1145] MeOH methanol
[1146] MHC major histocompatibility complex
[1147] MMP matrix metalloproteinase
[1148] MW Molecular Weight
[1149] MWCO Molecular Weight Cut Off
[1150] 1-Nap 1-napthylalanine
[1151] Nay, Na_{V} voltage-gated sodium channel
[1152] NEUT neutrophils
[1153] Nle norleucine
[1154] NMP N-methyl-2-pyrrolidinone
[1155] NMR Nuclear Magnetic Resonance
[1156] OAc acetate
[1157] PAGE polyacrylamide gel electrophoresis
[1158] PBMC peripheral blood mononuclear cell
[1159] PBS Phosphate-buffered saline
[1160] Pbf 2,2,4,6,7-pendamethyldihydrobenzofuran-5-sulfonyl
[1161] PCR polymerase chain reaction
[1162] PD pharmacodynamic
[1163] Pec pipecolic acid
[1164] PEG Poly(ethylene glycol)
[1165] Pic picolinic acid
[1166] PK pharmacokinetic
[1167] PNS peripheral nervous system
[1168] PX PatchXpress®
[1169] pY phosphotyrosine
[1170] RBS ribosome binding site
[1171] RT room temperature (25° C.)
[1172] Sar sarcosine
[1173] SDS sodium dodecyl sulfate
[1174] STK serine-threonine kinases
[1175] t-Boc tert-Butoxycarbonyl
[1176] tBu tert-Butyl
[1177] TCEP tris(2-carboxyethyl)phosphine
[1178] TCR T cell receptor
[1179] TFA trifluoroacetic acid
[1180] TG trigeminal ganglion
[1181] THF thymic humoral factor
[1182] Trt trityl
[1183] TTX tetrodotoxin
[1184] WCPC whole cell patch clamp

The application's sequence listing, which the Patent Office published only in electronic form, follows.

SEQUENCE LISTING (1746 sequences)

SEQ ID NO: 1 - protein, 29 aa, Chilobrachys jingzhao
  source: /note="N-term Amino group"
  source: /note="C-term FreeAcid"
YCQKWMWTCDSKRACCEGLRCKLWCRKII

SEQ ID NO: 2 - protein, 29 aa, Chilobrachys jingzhao
  source: /note="N-term Amino group"
  source: /note="C-term Amide"
YCQKWMWTCDSKRACCEGLRCKLWCRKII

SEQ ID NO: 3 - protein, 29 aa, Artificial Sequence
  source: /note="Description of Artificial Sequence: Synthetic peptide"
  source: /note="N-term Amino group"
  source: /note="C-term Amide"
ACQKWMWTCDSKRACCEGLRCKLWCRKII

SEQ ID NO: 4 - protein, 29 aa, Artificial Sequence
  source: /note="Description of Artificial Sequence: Synthetic peptide"
  source: /note="N-term Amino group"
  source: /note="C-term Amide"
YCAKWMWTCDSKRACCEGLRCKLWCRKII

SEQ ID NO: 5 - protein, 29 aa, Artificial Sequence
  source: /note="Description of Artificial Sequence: Synthetic peptide"
  source: /note="N-term Amino group"
  source: /note="C-term Amide"
YCQAWMWTCDSKRACCEGLRCKLWCRKII

SEQ ID NO: 6 - protein, 29 aa, Artificial Sequence
  source: /note="Description of Artificial Sequence: Synthetic peptide"
  source: /note="N-term Amino group"
  source: /note="C-term Amide"
YCQKAMWTCDSKRACCEGLRCKLWCRKII

SEQ ID NO: 7 - protein, 29 aa, Artificial Sequence
  source: /note="Description of Artificial Sequence: Synthetic peptide"
  source: /note="N-term Amino group"
  source: /note="C-term Amide"
YCQKWAWTCDSKRACCEGLRCKLWCRKII

SEQ ID NO: 8 - protein, 29 aa, Artificial Sequence
  source: /note="Description of Artificial Sequence: Synthetic peptide"
  source: /note="N-term Amino group"
  source: /note="C-term Amide"
YCQKWMATCDSKRACCEGLRCKLWCRKII

SEQ ID NO: 9 - protein, 29 aa, Artificial Sequence
  source: /note="Description of Artificial Sequence: Synthetic peptide"
  source: /note="N-term Amino group"
  source: /note="C-term Amide"
YCQKWMWACDSKRACCEGLRCKLWCRKII

SEQ ID NO: 10 - protein, 29 aa, Artificial Sequence
  source: /note="Description of Artificial Sequence: Synthetic peptide"
  source: /note="N-term Amino group"
  source: /note="C-term Amide"
YCQKWMWTCASKRACCEGLRCKLWCRKII

SEQ ID NO: 11 - protein, 29 aa, Artificial Sequence
  source: /note="Description of Artificial Sequence: Synthetic peptide"
  source: /note="N-term Amino group"
  source: /note="C-term Amide"
YCQKWMWTCDAKRACCEGLRCKLWCRKII

SEQ ID NO: 12 - protein, 29 aa, Artificial Sequence
  source: /note="Description of Artificial Sequence: Synthetic peptide"
  source: /note="N-term Amino group"
  source: /note="C-term Amide"
YCQKWMWTCDSARACCEGLRCKLWCRKII

SEQ ID NO: 13 - protein, 29 aa, Artificial Sequence
  source: /note="Description of Artificial Sequence: Synthetic peptide"
  source: /note="N-term Amino group"
  source: /note="C-term Amide"
YCQKWMWTCDSKAACCEGLRCKLWCRKII

SEQ ID NO: 14 - protein, 29 aa, Artificial Sequence
  source: /note="Description of Artificial Sequence: Synthetic peptide"
  source: /note="N-term Amino group"
  source: /note="C-term Amide"
YCQKWMWTCDSKRACCAGLRCKLWCRKII

SEQ ID NO: 15 - protein, 29 aa, Artificial Sequence
  source: /note="Description of Artificial Sequence: Synthetic peptide"
  source: /note="N-term Amino group"
  source: /note="C-term Amide"
YCQKWMWTCDSKRACCEALRCKLWCRKII

SEQ ID NO: 16 - protein, 29 aa, Artificial Sequence
  source: /note="Description of Artificial Sequence: Synthetic peptide"
  source: /note="N-term Amino group"
  source: /note="C-term Amide"
YCQKWMWTCDSKRACCEGARCKLWCRKII

SEQ ID NO: 17 - protein, 29 aa, Artificial Sequence
  source: /note="Description of Artificial Sequence: Synthetic peptide"
  source: /note="N-term Amino group"
  source: /note="C-term Amide"
YCQKWMWTCDSKRACCEGLACKLWCRKII

SEQ ID NO: 18 - protein, 29 aa, Artificial Sequence
  source: /note="Description of Artificial Sequence: Synthetic peptide"
  source: /note="N-term Amino group"
  source: /note="C-term Amide"
YCQKWMWTCDSKRACCEGLRCALWCRKII

SEQ ID NO: 19 - protein, 29 aa, Artificial Sequence
  source: /note="Description of Artificial Sequence: Synthetic peptide"
  source: /note="N-term Amino group"
  source: /note="C-term Amide"
YCQKWMWTCDSKRACCEGLRCKAWCRKII

SEQ ID NO: 20 - protein, 29 aa, Artificial Sequence
  source: /note="Description of Artificial Sequence: Synthetic peptide"
  source: /note="N-term Amino group"
  source: /note="C-term Amide"
YCQKWMWTCDSKRACCEGLRCKLACRKII

SEQ ID NO: 21 - protein, 29 aa, Artificial Sequence
  source: /note="Description of Artificial Sequence: Synthetic peptide"
  source: /note="N-term Amino group"
  source: /note="C-term Amide"
YCQKWMWTCDSKRACCEGLRCKLWCAKII

SEQ ID NO: 22 - protein, 29 aa, Artificial Sequence
  source: /note="Description of Artificial Sequence: Synthetic peptide"
  source: /note="N-term Amino group"
  source: /note="C-term Amide"
YCQKWMWTCDSKRACCEGLRCKLWCRAII

SEQ ID NO: 23 - protein, 29 aa, Artificial Sequence
  source: /note="Description of Artificial Sequence: Synthetic peptide"
  source: /note="N-term Amino group"
  source: /note="C-term Amide"
YCQKWMWTCDSKRACCEGLRCKLWCRKAI

SEQ ID NO: 24 - protein, 29 aa, Artificial Sequence
  source: /note="Description of Artificial Sequence: Synthetic peptide"
  source: /note="N-term Amino group"
  source: /note="C-term Amide"
YCQKWMWTCDSKRACCEGLRCKLWCRKIA

SEQ ID NO: 25 - protein, 29 aa, Artificial Sequence
  source: /note="Description of Artificial Sequence: Synthetic peptide"
  source: /note="N-term Amino group"
  MOD_RES (1)..(1): 1-Nal
  source: /note="C-term Amide"
ACQKWMWTCDSKRACCEGLRCKLWCRKII

SEQ ID NO: 26 - protein, 29 aa, Artificial Sequence
  source: /note="Description of Artificial Sequence: Synthetic peptide"
  source: /note="N-term Amino group"
  MOD_RES (3)..(3): 1-Nal
  source: /note="C-term Amide"
YCAKWMWTCDSKRACCEGLRCKLWCRKII

SEQ ID NO: 27 - protein, 29 aa, Artificial Sequence
  source: /note="Description of Artificial Sequence: Synthetic peptide"
  source: /note="N-term Amino group"
  MOD_RES (4)..(4): 1-Nal
  source: /note="C-term Amide"
YCQAWMWTCDSKRACCEGLRCKLWCRKII

SEQ ID NO: 28 - protein, 29 aa, Artificial Sequence
  source: /note="Description of Artificial Sequence: Synthetic peptide"
  source: /note="N-term Amino group"
  MOD_RES (5)..(5): 1-Nal
  source: /note="C-term Amide"
YCQKAMWTCDSKRACCEGLRCKLWCRKII

SEQ ID NO: 29 - protein, 29 aa, Artificial Sequence
  source: /note="Description of Artificial Sequence: Synthetic peptide"
  source: /note="N-term Amino group"
  MOD_RES (6)..(6): 1-Nal
  source: /note="C-term Amide"
YCQKWAWTCDSKRACCEGLRCKLWCRKII

SEQ ID NO: 30 - protein, 29 aa, Artificial Sequence
  source: /note="Description of Artificial Sequence: Synthetic peptide"
  source: /note="N-term Amino group"
  MOD_RES (7)..(7): 1-Nal
  source: /note="C-term Amide"
YCQKWMATCDSKRACCEGLRCKLWCRKII

SEQ ID NO: 31 - protein, 29 aa, Artificial Sequence
  source: /note="Description of Artificial Sequence: Synthetic peptide"
  source: /note="N-term Amino group"
  MOD_RES (8)..(8): 1-Nal
  source: /note="C-term Amide"
YCQKWMWACDSKRACCEGLRCKLWCRKII

SEQ ID NO: 32 - protein, 29 aa, Artificial Sequence
  source: /note="Description of Artificial Sequence: Synthetic peptide"
  source: /note="N-term Amino group"
  MOD_RES (10)..(10): 1-Nal
  source: /note="C-term Amide"
YCQKWMWTCASKRACCEGLRCKLWCRKII

SEQ ID NO: 33 - protein, 29 aa, Artificial Sequence
  source: /note="Description of Artificial Sequence: Synthetic peptide"
  source: /note="N-term Amino group"
  MOD_RES (11)..(11): 1-Nal
  source: /note="C-term Amide"
YCQKWMWTCDAKRACCEGLRCKLWCRKII

SEQ ID NO: 34 - protein, 29 aa, Artificial Sequence
  source: /note="Description of Artificial Sequence: Synthetic peptide"
  source: /note="N-term Amino group"
  MOD_RES (12)..(12): 1-Nal
  source: /note="C-term Amide"
YCQKWMWTCDSARACCEGLRCKLWCRKII

SEQ ID NO: 35 - protein, 29 aa, Artificial Sequence
  source: /note="Description of Artificial Sequence: Synthetic peptide"
  source: /note="N-term Amino group"
  MOD_RES (13)..(13): 1-Nal
  source: /note="C-term Amide"
YCQKWMWTCDSKAACCEGLRCKLWCRKII

SEQ ID NO: 36 - protein, 29 aa, Artificial Sequence
  source: /note="Description of Artificial Sequence: Synthetic peptide"
  source: /note="N-term Amino group"
  MOD_RES (14)..(14): 1-Nal
  source: /note="C-term Amide"
YCQKWMWTCDSKRACCEGLRCKLWCRKII

SEQ ID NO: 37 - protein, 29 aa, Artificial Sequence
  source: /note="Description of Artificial Sequence: Synthetic peptide"
  source: /note="N-term Amino group"
  MOD_RES (17)..(17): 1-Nal
  source: /note="C-term Amide"
YCQKWMWTCDSKRACCAGLRCKLWCRKII

SEQ ID NO: 38 - protein, 29 aa, Artificial Sequence
  source: /note="Description of Artificial Sequence: Synthetic peptide"
  source: /note="N-term Amino group"
  MOD_RES (18)..(18): 1-Nal
  source: /note="C-term Amide"
YCQKWMWTCDSKRACCEALRCKLWCRKII

SEQ ID NO: 39 - protein, 29 aa, Artificial Sequence
  source: /note="Description of Artificial Sequence: Synthetic peptide"
  source: /note="N-term Amino group"
  MOD_RES (19)..(19): 1-Nal
  source: /note="C-term Amide"
YCQKWMWTCDSKRACCEGARCKLWCRKII

SEQ ID NO: 40 - protein, 29 aa, Artificial Sequence
  source: /note="Description of Artificial Sequence: Synthetic peptide"
  source: /note="N-term Amino group"
  MOD_RES (20)..(20): 1-Nal
  source: /note="C-term Amide"
YCQKWMWTCDSKRACCEGLACKLWCRKII

SEQ ID NO: 41 - protein, 29 aa, Artificial Sequence
  source: /note="Description of Artificial Sequence: Synthetic peptide"
  source: /note="N-term Amino group"
  MOD_RES (22)..(22): 1-Nal
  source: /note="C-term Amide"
YCQKWMWTCDSKRACCEGLRCALWCRKII

SEQ ID NO: 42 - protein, 29 aa, Artificial Sequence
  source: /note="Description of Artificial Sequence: Synthetic peptide"
  source: /note="N-term Amino group"
  MOD_RES (23)..(23): 1-Nal
  source: /note="C-term Amide"
YCQKWMWTCDSKRACCEGLRCKAWCRKII

SEQ ID NO: 43 - protein, 29 aa, Artificial Sequence
  source: /note="Description of Artificial Sequence: Synthetic peptide"
  source: /note="N-term Amino group"
  MOD_RES (24)..(24): 1-Nal
  source: /note="C-term Amide"
YCQKWMWTCDSKRACCEGLRCKLACRKII

SEQ ID NO: 44 - protein, 29 aa, Artificial Sequence
  source: /note="Description of Artificial Sequence: Synthetic peptide"
  source: /note="N-term Amino group"
  MOD_RES (26)..(26): 1-Nal
  source: /note="C-term Amide"
YCQKWMWTCDSKRACCEGLRCKLWCAKII

SEQ ID NO: 45 - protein, 29 aa, Artificial Sequence
  source: /note="Description of Artificial Sequence: Synthetic peptide"
  source: /note="N-term Amino group"
  MOD_RES (27)..(27): 1-Nal
  source: /note="C-term Amide"
YCQKWMWTCDSKRACCEGLRCKLWCRAII

SEQ ID NO: 46 - protein, 29 aa, Artificial Sequence
  source: /note="Description of Artificial Sequence: Synthetic peptide"
  source: /note="N-term Amino group"
  MOD_RES (28)..(28): 1-Nal
  source: /note="C-term Amide"
YCQKWMWTCDSKRACCEGLRCKLWCRKAI

SEQ ID NO: 47 - protein, 29 aa, Artificial Sequence
  source: /note="Description of Artificial Sequence: Synthetic peptide"
  source: /note="N-term Amino group"
  MOD_RES (29)..(29): 1-Nal
  source: /note="C-term Amide"
YCQKWMWTCDSKRACCEGLRCKLWCRKIA

SEQ ID NO: 48 - protein, 29 aa, Chilobrachys jingzhao
YCQKWMWTCDSERKCCEGYVCELWCKYNL

SEQ ID NO: 49 - protein, 29 aa, Artificial Sequence
  source: /note="Description of Artificial Sequence: Synthetic peptide"
  source: /note="N-term Amino group"
  source: /note="C-term Amide"
ECQKWMWTCDSKRACCEGLRCKLWCRKII

SEQ ID NO: 50 - protein, 29 aa, Artificial Sequence
  source: /note="Description of Artificial Sequence: Synthetic peptide"
  source: /note="N-term Amino group"
  source: /note="C-term Amide"
YCEKWMWTCDSKRACCEGLRCKLWCRKII

SEQ ID NO: 51 - protein, 29 aa, Artificial Sequence
  source: /note="Description of Artificial Sequence: Synthetic peptide"
  source: /note="N-term Amino group"
  source: /note="C-term Amide"
YCQEWMWTCDSKRACCEGLRCKLWCRKII

SEQ ID NO: 52 - protein, 29 aa, Artificial Sequence
  source: /note="Description of Artificial Sequence: Synthetic peptide"
  source: /note="N-term Amino group"
  source: /note="C-term Amide"
YCQKEMWTCDSKRACCEGLRCKLWCRKII

SEQ ID NO: 53 - protein, 29 aa, Artificial Sequence
  source: /note="Description of Artificial Sequence: Synthetic peptide"
  source: /note="N-term Amino group"
  source: /note="C-term Amide"
YCQKWEWTCDSKRACCEGLRCKLWCRKII

SEQ ID NO: 54 - protein, 29 aa, Artificial Sequence
  source: /note="Description of Artificial Sequence: Synthetic peptide"
  source: /note="N-term Amino group"
  source: /note="C-term Amide"
YCQKWMETCDSKRACCEGLRCKLWCRKII

SEQ ID NO: 55 - protein, 29 aa, Artificial Sequence
  source: /note="Description of Artificial Sequence: Synthetic peptide"
  source: /note="N-term Amino group"
  source: /note="C-term Amide"
YCQKWMWECDSKRACCEGLRCKLWCRKII

SEQ ID NO: 56 - protein, 29 aa, Artificial Sequence
  source: /note="Description of Artificial Sequence: Synthetic peptide"
  source: /note="N-term Amino group"
  source: /note="C-term Amide"
YCQKWMWTCESKRACCEGLRCKLWCRKII

SEQ ID NO: 57 - protein, 29 aa, Artificial Sequence
  source: /note="Description of Artificial Sequence: Synthetic peptide"
  source: /note="N-term Amino group"
  source: /note="C-term Amide"
YCQKWMWTCDEKRACCEGLRCKLWCRKII

SEQ ID NO: 58 - protein, 29 aa, Artificial Sequence
  source: /note="Description of Artificial Sequence: Synthetic peptide"
  source: /note="N-term Amino group"
  source: /note="C-term Amide"
YCQKWMWTCDSERACCEGLRCKLWCRKII

SEQ ID NO: 59 - protein, 29 aa, Artificial Sequence
  source: /note="Description of Artificial Sequence: Synthetic peptide"
  source: /note="N-term Amino group"
  source: /note="C-term Amide"
YCQKWMWTCDSKEACCEGLRCKLWCRKII

SEQ ID NO: 60 - protein, 29 aa, Artificial Sequence
  source: /note="Description of Artificial Sequence: Synthetic peptide"
  source: /note="N-term Amino group"
  source: /note="C-term Amide"
YCQKWMWTCDSKRECCEGLRCKLWCRKII

SEQ ID NO: 61 - protein, 29 aa, Artificial Sequence
  source: /note="Description of Artificial Sequence: Synthetic peptide"
  source: /note="N-term Amino group"
  source: /note="C-term Amide"
YCQKWMWTCDSKRACCEELRCKLWCRKII

SEQ ID NO: 62 - protein, 29 aa, Artificial Sequence
  source: /note="Description of Artificial Sequence: Synthetic peptide"
  source: /note="N-term Amino group"
  source: /note="C-term Amide"
YCQKWMWTCDSKRACCEGERCKLWCRKII

SEQ ID NO: 63 - protein, 29 aa, Artificial Sequence
  source: /note="Description of Artificial Sequence: Synthetic peptide"
  source: /note="N-term Amino group"
  source: /note="C-term Amide"
YCQKWMWTCDSKRACCEGLECKLWCRKII

SEQ ID NO: 64 - protein, 29 aa, Artificial Sequence
  source: /note="Description of Artificial Sequence: Synthetic peptide"
  source: /note="N-term Amino group"
  source: /note="C-term Amide"
YCQKWMWTCDSKRACCEGLRCELWCRKII

SEQ ID NO: 65 - protein, 29 aa, Artificial Sequence
  source: /note="Description of Artificial Sequence: Synthetic peptide"
  source: /note="N-term Amino group"
  source: /note="C-term Amide"
YCQKWMWTCDSKRACCEGLRCKEWCRKII

SEQ ID NO: 66 - protein, 29 aa, Artificial Sequence
  source: /note="Description of Artificial Sequence: Synthetic peptide"
  source: /note="N-term Amino group"
  source: /note="C-term Amide"
YCQKWMWTCDSKRACCEGLRCKLECRKII

SEQ ID NO: 67 - protein, 29 aa, Artificial Sequence
  source: /note="Description of Artificial Sequence: Synthetic peptide"
  source: /note="N-term Amino group"
  source: /note="C-term Amide"
YCQKWMWTCDSKRACCEGLRCKLWCEKII

SEQ ID NO: 68 - protein, 29 aa, Artificial Sequence
  source: /note="Description of Artificial Sequence: Synthetic peptide"
  source: /note="N-term Amino group"
  source: /note="C-term Amide"
YCQKWMWTCDSKRACCEGLRCKLWCREII

SEQ ID NO: 69 - protein, 29 aa, Artificial Sequence
  source: /note="Description of Artificial Sequence: Synthetic peptide"
  source: /note="N-term Amino group"
  source: /note="C-term Amide"
YCQKWMWTCDSKRACCEGLRCKLWCRKEI

SEQ ID NO: 70 - protein, 29 aa, Artificial Sequence
  source: /note="Description of Artificial Sequence: Synthetic peptide"
  source: /note="N-term Amino group"
  source: /note="C-term Amide"
YCQKWMWTCDSKRACCEGLRCKLWCRKIE

SEQ ID NO: 71 - protein, 29 aa, Artificial Sequence
  source: /note="Description of Artificial Sequence: Synthetic peptide"
  source: /note="N-term Amino group"
  source: /note="C-term Amide"
KCQKWMWTCDSKRACCEGLRCKLWCRKII

SEQ ID NO: 72 - protein, 29 aa, Artificial Sequence
  source: /note="Description of Artificial Sequence: Synthetic peptide"
  source: /note="N-term Amino group"
  source: /note="C-term Amide"
YCKKWMWTCDSKRACCEGLRCKLWCRKII

SEQ ID NO: 73 - protein, 29 aa, Artificial Sequence
  source: /note="Description of Artificial Sequence: Synthetic peptide"
  source: /note="N-term Amino group"
  source: /note="C-term Amide"
YCQKKMWTCDSKRACCEGLRCKLWCRKII

SEQ ID NO: 74 - protein, 29 aa, Artificial Sequence
  source: /note="Description of Artificial Sequence: Synthetic peptide"
  source: /note="N-term Amino group"
  source: /note="C-term Amide"
YCQKWKWTCDSKRACCEGLRCKLWCRKII

SEQ ID NO: 75 - protein, 29 aa, Artificial Sequence
  source: /note="Description of Artificial Sequence: Synthetic peptide"
  source: /note="N-term Amino group"
  source: /note="C-term Amide"
YCQKWMKTCDSKRACCEGLRCKLWCRKII

SEQ ID NO: 76 - protein, 29 aa, Artificial Sequence
  source: /note="Description of Artificial Sequence: Synthetic peptide"
  source: /note="N-term Amino group"
  source: /note="C-term Amide"
YCQKWMWKCDSKRACCEGLRCKLWCRKII

SEQ ID NO: 77 - protein, 29 aa, Artificial Sequence
  source: /note="Description of Artificial Sequence: Synthetic peptide"
  source: /note="N-term Amino group"
  source: /note="C-term Amide"
YCQKWMWTCKSKRACCEGLRCKLWCRKII

SEQ ID NO: 78 - protein, 29 aa, Artificial Sequence
  source: /note="Description of Artificial Sequence: Synthetic peptide"
  source: /note="N-term Amino group"
  source: /note="C-term Amide"
YCQKWMWTCDKKRACCEGLRCKLWCRKII

SEQ ID NO: 79 - protein, 29 aa, Artificial Sequence
  source: /note="Description of Artificial Sequence: Synthetic peptide"
  source: /note="N-term Amino group"
  source: /note="C-term Amide"
YCQKWMWTCDSKKACCEGLRCKLWCRKII

SEQ ID NO: 80 - protein, 29 aa, Artificial Sequence
  source: /note="Description of Artificial Sequence: Synthetic peptide"
  source: /note="N-term Amino group"
  source: /note="C-term Amide"
YCQKWMWTCDSKRKCCEGLRCKLWCRKII

SEQ ID NO: 81 - protein, 29 aa, Artificial Sequence
  source: /note="Description of Artificial Sequence: Synthetic peptide"
  source: /note="N-term Amino group"
  source: /note="C-term Amide"
YCQKWMWTCDSKRACCKGLRCKLWCRKII

SEQ ID NO: 82 - protein, 29 aa, Artificial Sequence
  source: /note="Description of Artificial Sequence: Synthetic peptide"
  source: /note="N-term Amino group"
  source: /note="C-term Amide"
YCQKWMWTCDSKRACCEKLRCKLWCRKII

SEQ ID NO: 83 - protein, 29 aa, Artificial Sequence
  source: /note="Description of Artificial Sequence: Synthetic peptide"
  source: /note="N-term Amino group"
  source: /note="C-term Amide"
YCQKWMWTCDSKRACCEGKRCKLWCRKII

SEQ ID NO: 84 - protein, 29 aa, Artificial Sequence
  source: /note="Description of Artificial Sequence: Synthetic peptide"
  source: /note="N-term Amino group"
  source: /note="C-term Amide"
YCQKWMWTCDSKRACCEGLKCKLWCRKII

SEQ ID NO: 85 - protein, 29 aa, Artificial Sequence
  source: /note="Description of Artificial Sequence: Synthetic peptide"
  source: /note="N-term Amino group"
  source: /note="C-term Amide"
YCQKWMWTCDSKRACCEGLRCKKWCRKII

SEQ ID NO: 86 - protein, 29 aa, Artificial Sequence
  source: /note="Description of Artificial Sequence: Synthetic peptide"
  source: /note="N-term Amino group"
  source: /note="C-term Amide"
YCQKWMWTCDSKRACCEGLRCKLKCRKII

SEQ ID NO: 87 - protein, 29 aa, Artificial Sequence
  source: /note="Description of Artificial Sequence: Synthetic peptide"
  source: /note="N-term Amino group"
  source: /note="C-term Amide"
YCQKWMWTCDSKRACCEGLRCKLWCKKII

SEQ ID NO: 88 - protein, 29 aa, Artificial Sequence
  source: /note="Description of Artificial Sequence: Synthetic peptide"
  source: /note="N-term Amino group"
  source: /note="C-term Amide"
YCQKWMWTCDSKRACCEGLRCKLWCRKKI

SEQ ID NO: 89 - protein, 29 aa, Artificial Sequence
  source: /note="Description of Artificial Sequence: Synthetic peptide"
  source: /note="N-term Amino group"
  source: /note="C-term Amide"
YCQKWMWTCDSKRACCEGLRCKLWCRKIK

SEQ ID NO: 90 - protein, 29 aa, Artificial Sequence
  source: /note="Description of Artificial Sequence: Synthetic peptide"
  source: /note="N-term Amino group"
  source: /note="C-term Amide"
RCQKWMWTCDSKRACCEGLRCKLWCRKII

SEQ ID NO: 91 - protein, 29 aa, Artificial Sequence
  source: /note="Description of Artificial Sequence: Synthetic peptide"
  source: /note="N-term Amino group"
  source: /note="C-term Amide"
YCRKWMWTCDSKRACCEGLRCKLWCRKII

SEQ ID NO: 92 - protein, 29 aa, Artificial Sequence
  source: /note="Description of Artificial Sequence: Synthetic peptide"
  source: /note="N-term Amino group"
  source: /note="C-term Amide"
YCQRWMWTCDSKRACCEGLRCKLWCRKII

SEQ ID NO: 93 - protein, 29 aa, Artificial Sequence
  source: /note="Description of Artificial Sequence: Synthetic peptide"
  source: /note="N-term Amino group"
  source: /note="C-term Amide"
YCQKRMWTCDSKRACCEGLRCKLWCRKII

SEQ ID NO: 94 - protein, 29 aa, Artificial Sequence
  source: /note="Description of Artificial Sequence: Synthetic peptide"
  source: /note="N-term Amino group"
  source: /note="C-term Amide"
YCQKWRWTCDSKRACCEGLRCKLWCRKII

SEQ ID NO: 95 - protein, 29 aa, Artificial Sequence
  source: /note="Description of Artificial Sequence: Synthetic peptide"
  source: /note="N-term Amino group"
  source: /note="C-term Amide"
YCQKWMRTCDSKRACCEGLRCKLWCRKII

SEQ ID NO: 96 - protein, 29 aa, Artificial Sequence
  source: /note="Description of Artificial Sequence: Synthetic peptide"
  source: /note="N-term Amino group"
  source: /note="C-term Amide"
YCQKWMWRCDSKRACCEGLRCKLWCRKII

SEQ ID NO: 97 - protein, 29 aa, Artificial Sequence
  source: /note="Description of Artificial Sequence: Synthetic peptide"
  source: /note="N-term Amino group"
  source: /note="C-term Amide"
YCQKWMWTCRSKRACCEGLRCKLWCRKII

SEQ ID NO: 98 - protein, 29 aa, Artificial Sequence
  source: /note="Description of Artificial Sequence: Synthetic peptide"
  source: /note="N-term Amino group"
  source: /note="C-term Amide"
YCQKWMWTCDRKRACCEGLRCKLWCRKII

SEQ ID NO: 99 - protein, 29 aa, Artificial Sequence
  source: /note="Description of Artificial Sequence: Synthetic peptide"
  source: /note="N-term Amino group"
  source: /note="C-term Amide"
YCQKWMWTCDSRRACCEGLRCKLWCRKII

SEQ ID NO: 100 - protein, 29 aa, Artificial Sequence
  source: /note="Description of Artificial Sequence: Synthetic peptide"
  source: /note="N-term Amino group"
  source: /note="C-term Amide"
YCQKWMWTCDSKRRCCEGLRCKLWCRKII

SEQ ID NO: 101 - protein, 29 aa, Artificial Sequence
  source: /note="Description of Artificial Sequence: Synthetic peptide"
  source: /note="N-term Amino group"
  source: /note="C-term Amide"
YCQKWMWTCDSKRACCRGLRCKLWCRKII

SEQ ID NO: 102 - protein, 29 aa, Artificial Sequence
  source: /note="Description of Artificial Sequence: Synthetic peptide"
  source: /note="N-term Amino group"
  source: /note="C-term Amide"
YCQKWMWTCDSKRACCERLRCKLWCRKII

SEQ ID NO: 103 - protein, 29 aa, Artificial Sequence
  source: /note="Description of Artificial Sequence: Synthetic peptide"
  source: /note="N-term Amino group"
  source: /note="C-term Amide"
YCQKWMWTCDSKRACCEGRRCKLWCRKII

SEQ ID NO: 104 - protein, 29 aa, Artificial Sequence
  source: /note="Description of Artificial Sequence: Synthetic peptide"
  source: /note="N-term Amino group"
  source: /note="C-term Amide"
YCQKWMWTCDSKRACCEGLRCRLWCRKII

SEQ ID NO: 105 - protein, 29 aa, Artificial Sequence
  source: /note="Description of Artificial Sequence: Synthetic peptide"
  source: /note="N-term Amino group"
  source: /note="C-term Amide"
YCQKWMWTCDSKRACCEGLRCKRWCRKII

SEQ ID NO: 106 - protein, 29 aa, Artificial Sequence
  source: /note="Description of Artificial Sequence: Synthetic peptide"
  source: /note="N-term Amino group"
  source: /note="C-term Amide"
YCQKWMWTCDSKRACCEGLRCKLRCRKII

SEQ ID NO: 107 - protein, 29 aa, Artificial Sequence
  source: /note="Description of Artificial Sequence: Synthetic peptide"
  source: /note="N-term Amino group"
  source: /note="C-term Amide"
YCQKWMWTCDSKRACCEGLRCKLWCRRII

SEQ ID NO: 108 - protein, 29 aa, Artificial Sequence
  source: /note="Description of Artificial Sequence: Synthetic peptide"
  source: /note="N-term Amino group"
  source: /note="C-term Amide"
YCQKWMWTCDSKRACCEGLRCKLWCRKRI

SEQ ID NO: 109 - protein, 29 aa, Artificial Sequence
  source: /note="Description of Artificial Sequence: Synthetic peptide"
  source: /note="N-term Amino group"
  source: /note="C-term Amide"
YCQKWMWTCDSKRACCEGLRCKLWCRKIR

SEQ ID NO: 110 - protein, 29 aa, Artificial Sequence
  source: /note="Description of Artificial Sequence: Synthetic peptide"
  source: /note="N-term Amino group"
  MOD_RES (6)..(6): Nle
  source: /note="C-term Amide"
YCQKWLWTCDSKRACCEGLECKLWCRKII

SEQ ID NO: 111 - protein, 29 aa, Artificial Sequence
  source: /note="Description of Artificial Sequence: Synthetic peptide"
  source: /note="N-term Amino group"
  MOD_RES (6)..(6): Nva
  source: /note="C-term Amide"
YCQKWVWTCDSKRACCEGLECKLWCRKII

SEQ ID NO: 112 - protein, 29 aa, Artificial Sequence
  source: /note="Description of Artificial Sequence: Synthetic peptide"
  source: /note="N-term Amino group"
  source: /note="C-term Amide"
YCQKWMWTCDSKRACCEGLECKLWCRKIW

SEQ ID NO: 113 - protein, 30 aa, Artificial Sequence
  source: /note="Description of Artificial Sequence: Synthetic polypeptide"
  source: /note="N-term Amino group"
  source: /note="C-term Amide"
YCQKWMWTCDSKRACCEGLECKLWCRKIIW

SEQ ID NO: 114 - protein, 29 aa, Artificial Sequence
  source: /note="Description of Artificial Sequence: Synthetic peptide"
  source: /note="N-term Amino group"
  MOD_RES (20)..(20): Cpa
  source: /note="C-term Amide"
YCQKWMWTCDSKRACCEGLFCKLWCRKII

SEQ ID NO: 115 - protein, 29 aa, Artificial Sequence
  source: /note="Description of Artificial Sequence: Synthetic peptide"
  source: /note="N-term Amino group"
  source: /note="C-term Amide"
YCQKWMWTCDSKRACCEGLDCKLWCRKII

SEQ ID NO: 116 - protein, 29 aa, Artificial Sequence
  source: /note="Description of Artificial Sequence: Synthetic peptide"
  source: /note="N-term Amino group"
  MOD_RES (20)..(20): 4-Cl-Phe
  source: /note="C-term Amide"
YCQKWMWTCDSKRACCEGLFCKLWCRKII

SEQ ID NO: 117 - protein, 29 aa, Artificial Sequence
  source: /note="Description of Artificial Sequence: Synthetic peptide"
  source: /note="N-term Amino group"
  MOD_RES (20)..(20): Abu
  source: /note="C-term Amide"
YCQKWMWTCDSKRACCEGLXCKLWCRKII

SEQ ID NO: 118 - protein, 29 aa, Artificial Sequence
  source: /note="Description of Artificial Sequence: Synthetic peptide"
  source: /note="N-term Amino group"
  source: /note="C-term Amide"
YCQKWMWTCDSKRACCEGLICKLWCRKII

SEQ ID NO: 119 - protein, 29 aa, Artificial Sequence
  source: /note="Description of Artificial Sequence: Synthetic peptide"
  source: /note="N-term Amino group"
  source: /note="C-term Amide"
YCQKWMWTCDSKRACCEGLLCKLWCRKII

SEQ ID NO: 120 - protein, 29 aa, Artificial Sequence
  source: /note="Description of Artificial Sequence: Synthetic peptide"
  source: /note="N-term Amino group"
  source: /note="C-term Amide"
YCQKWMWTCDSKRACCEGLVCKLWCRKII

SEQ ID NO: 121 - protein, 29 aa, Artificial Sequence
  source: /note="Description of Artificial Sequence: Synthetic peptide"
  source: /note="N-term Amino group"
  source: /note="C-term Amide"
YCQKWMWTCDSKRACCEGLGCKLWCRKII

SEQ ID NO: 122 - protein, 29 aa, Artificial Sequence
  source: /note="Description of Artificial Sequence: Synthetic peptide"
  source: /note="N-term Amino group"
  MOD_RES (20)..(20): Cit
  source: /note="C-term Amide"
YCQKWMWTCDSKRACCEGLXCKLWCRKII

SEQ ID NO: 123 - protein, 29 aa, Artificial Sequence
  source: /note="Description of Artificial Sequence: Synthetic peptide"
  source: /note="N-term Amino group"
  MOD_RES (20)..(20): Nva
  source: /note="C-term Amide"
YCQKWMWTCDSKRACCEGLVCKLWCRKII

SEQ ID NO: 124 - protein, 29 aa, Artificial Sequence
  source: /note="Description of Artificial Sequence: Synthetic peptide"
  source: /note="N-term Amino group"
  source: /note="C-term Amide"
YCQKWMWTCDSKRACCEGLYCKLWCRKII

SEQ ID NO: 125 - protein, 29 aa, Artificial Sequence
  source: /note="Description of Artificial Sequence: Synthetic peptide"
  source: /note="N-term Amino group"
  source: /note="C-term Amide"
YCQKWMWTCDSKRACCEGLSCKLWCRKII

SEQ ID NO: 126 - protein, 29 aa, Artificial Sequence
  source: /note="Description of Artificial Sequence: Synthetic peptide"
  source: /note="N-term Amino group"
  source: /note="C-term Amide"
YCQKWMWTCDSKRACCEGLECKLWCRKEI

SEQ ID NO: 127 - protein, 29 aa, Artificial Sequence
  source: /note="Description of Artificial Sequence: Synthetic peptide"
  source: /note="N-term Amino group"
  MOD_RES (28)..(28): Cpa
  source: /note="C-term Amide"
YCQKWMWTCDSKRACCEGLECKLWCRKFI

SEQ ID NO: 128 - protein, 29 aa, Artificial Sequence
  source: /note="Description of Artificial Sequence: Synthetic peptide"
  source: /note="N-term Amino group"
  source: /note="C-term Amide"
YCQKWMWTCDSKRACCEGLECKLWCRKDI

SEQ ID NO: 129 - protein, 29 aa, Artificial Sequence
  source: /note="Description of Artificial Sequence: Synthetic peptide"
  source: /note="N-term Amino group"
  MOD_RES (28)..(28): 4-Cl-Phe
  source: /note="C-term Amide"
YCQKWMWTCDSKRACCEGLECKLWCRKFI

SEQ ID NO: 130 - protein, 29 aa, Artificial Sequence
  source: /note="Description of Artificial Sequence: Synthetic peptide"
  source: /note="N-term Amino group"
  MOD_RES (28)..(28): Abu
  source: /note="C-term Amide"
YCQKWMWTCDSKRACCEGLECKLWCRKXI

SEQ ID NO: 131 - protein, 29 aa, Artificial Sequence
  source: /note="Description of Artificial Sequence: Synthetic peptide"
  source: /note="N-term Amino group"
  source: /note="C-term Amide"
YCQKWMWTCDSKRACCEGLECKLWCRKII

SEQ ID NO: 132 - protein, 29 aa, Artificial Sequence
  source: /note="Description of Artificial Sequence: Synthetic peptide"
  source: /note="N-term Amino group"
  source: /note="C-term Amide"
YCQKWMWTCDSKRACCEGLECKLWCRKLI

SEQ ID NO: 133 - protein, 29 aa, Artificial Sequence
  source: /note="Description of Artificial Sequence: Synthetic peptide"
  source: /note="N-term Amino group"
  source: /note="C-term Amide"
YCQKWMWTCDSKRACCEGLECKLWCRKVI

SEQ ID NO: 134 - protein, 29 aa, Artificial Sequence
  source: /note="Description of Artificial Sequence: Synthetic peptide"
  source: /note="N-term Amino group"
  source: /note="C-term Amide"
YCQKWMWTCDSKRACCEGLECKLWCRKGI

SEQ ID NO: 135 - protein, 29 aa, Artificial Sequence
  source: /note="Description of Artificial Sequence: Synthetic peptide"
  source: /note="N-term Amino group"
  MOD_RES (28)..(28): Cit
  source: /note="C-term Amide"
YCQKWMWTCDSKRACCEGLECKLWCRKXI

SEQ ID NO: 136 - protein, 29 aa, Artificial Sequence
  source: /note="Description of Artificial Sequence: Synthetic peptide"
  source: /note="N-term Amino group"
  MOD_RES (28)..(28): Nva
  source: /note="C-term Amide"
YCQKWMWTCDSKRACCEGLECKLWCRKVI

SEQ ID NO: 137 - protein, 29 aa, Artificial Sequence
  source: /note="Description of Artificial Sequence: Synthetic peptide"
  source: /note="N-term Amino group"
  source: /note="C-term Amide"
YCQKWMWTCDSKRACCEGLECKLWCRKYI

SEQ ID NO: 138 - protein, 29 aa, Artificial Sequence
  source: /note="Description of Artificial Sequence: Synthetic peptide"
  source: /note="N-term Amino group"
  source: /note="C-term Amide"
YCQKWMWTCDSKRACCEGLECKLWCRKSI

SEQ ID NO: 139 - protein, 29 aa, Artificial Sequence
  source: /note="Description of Artificial Sequence: Synthetic peptide"
  source: /note="N-term 4-Pen"
  source: /note="C-term Amide"
YCQKWMWTCDSKRACCEGLECKLWCRKII

SEQ ID NO: 140 - protein, 29 aa, Artificial Sequence
  source: /note="Description of Artificial Sequence: Synthetic peptide"
  source: /note="N-term Amino group"
  MOD_RES (1)..(1): Pra
  source: /note="C-term Amide"
GCQKWMWTCDSKRACCEGLECKLWCRKII

SEQ ID NO: 141 - protein, 29 aa, Artificial Sequence
  source: /note="Description of Artificial Sequence: Synthetic peptide"
  source: /note="N-term Amino group"
  MOD_RES (3)..(3): Pra
  source: /note="C-term Amide"
YCGKWMWTCDSKRACCEGLECKLWCRKII

SEQ ID NO: 142 - protein, 29 aa, Artificial Sequence
  source: /note="Description of Artificial Sequence: Synthetic peptide"
  source: /note="N-term Amino group"
  MOD_RES (4)..(4): Pra
  source: /note="C-term Amide"
YCQGWMWTCDSKRACCEGLECKLWCRKII

SEQ ID NO: 143 - protein, 29 aa, Artificial Sequence
  source: /note="Description of Artificial Sequence: Synthetic peptide"
  source: /note="N-term Amino group"
  MOD_RES (5)..(5): Pra
  source: /note="C-term Amide"
YCQKGMWTCDSKRACCEGLECKLWCRKII

SEQ ID NO: 144 - protein, 29 aa, Artificial Sequence
  source: /note="Description of Artificial Sequence: Synthetic peptide"
  source: /note="N-term Amino group"
  MOD_RES (6)..(6): Pra
  source: /note="C-term Amide"
YCQKWGWTCDSKRACCEGLECKLWCRKII

SEQ ID NO: 145 - protein, 29 aa, Artificial Sequence
  source: /note="Description of Artificial Sequence: Synthetic peptide"
  source: /note="N-term Amino group"
  MOD_RES (7)..(7): Pra
  source: /note="C-term Amide"
YCQKWMGTCDSKRACCEGLECKLWCRKII

SEQ ID NO: 146 - protein, 29 aa, Artificial Sequence
  source: /note="Description of Artificial Sequence: Synthetic peptide"
  source: /note="N-term Amino group"
  MOD_RES (8)..(8): Pra
  source: /note="C-term Amide"
YCQKWMWGCDSKRACCEGLECKLWCRKII

SEQ ID NO: 147 - protein, 29 aa, Artificial Sequence
  source: /note="Description of Artificial Sequence: Synthetic peptide"
  source: /note="N-term Amino group"
  MOD_RES (9)..(9): Pra
  source: /note="C-term Amide"
YCQKWMWTGDSKRACCEGLECKLWCRKII

SEQ ID NO: 148 - protein, 29 aa, Artificial Sequence
  source: /note="Description of Artificial Sequence: Synthetic peptide"
  source: /note="N-term Amino group"
  MOD_RES (10)..(10): Pra
  source: /note="C-term Amide"
YCQKWMWTCGSKRACCEGLECKLWCRKII

SEQ ID NO: 149 - protein, 29 aa, Artificial Sequence
  source: /note="Description of Artificial Sequence: Synthetic peptide"
  source: /note="N-term Amino group"
  MOD_RES (11)..(11): Pra
  source: /note="C-term Amide"
YCQKWMWTCDGKRACCEGLECKLWCRKII

SEQ ID NO: 150 - protein, 29 aa, Artificial Sequence
  source: /note="Description of Artificial Sequence: Synthetic peptide"
  source: /note="N-term Amino group"
  MOD_RES (12)..(12): Pra
  source: /note="C-term Amide"
YCQKWMWTCDSGRACCEGLECKLWCRKII

SEQ ID NO: 151 - protein, 29 aa, Artificial Sequence
  source: /note="Description of Artificial Sequence: Synthetic peptide"
  source: /note="N-term Amino group"
  MOD_RES (13)..(13): Pra
  source: /note="C-term Amide"
YCQKWMWTCDSKGACCEGLECKLWCRKII

SEQ ID NO: 152 - protein, 29 aa, Artificial Sequence
  source: /note="Description of Artificial Sequence: Synthetic peptide"
  source: /note="N-term Amino group"
  MOD_RES (14)..(14): Pra
  source: /note="C-term Amide"
YCQKWMWTCDSKRGCCEGLECKLWCRKII

SEQ ID NO: 153 - protein, 29 aa, Artificial Sequence
  source: /note="Description of Artificial Sequence: Synthetic peptide"
  source: /note="N-term Amino group"
  MOD_RES (17)..(17): Pra
  source: /note="C-term Amide"
YCQKWMWTCDSKRACCGGLECKLWCRKII

SEQ ID NO: 154 - protein, 29 aa, Artificial Sequence
  source: /note="Description of Artificial Sequence: Synthetic peptide"
  source: /note="N-term Amino group"
  MOD_RES (18)..(18): Pra
  source: /note="C-term Amide"
YCQKWMWTCDSKRACCEGLECKLWCRKII

SEQ ID NO: 155 - protein, 29 aa, Artificial Sequence
  source: /note="Description of Artificial Sequence: Synthetic peptide"
  source: /note="N-term Amino group"
  MOD_RES (19)..(19): Pra
  source: /note="C-term Amide"
YCQKWMWTCDSKRACCEGGECKLWCRKII

SEQ ID NO: 156 - protein, 29 aa, Artificial Sequence
  source: /note="Description of Artificial Sequence: Synthetic peptide"
  source: /note="N-term Amino group"
  MOD_RES (20)..(20): Pra
  source: /note="C-term Amide"
YCQKWMWTCDSKRACCEGLGCKLWCRKII

SEQ ID NO: 157 - protein, 29 aa, Artificial Sequence
  source: /note="Description of Artificial Sequence: Synthetic peptide"
  source: /note="N-term Amino group"
  MOD_RES (22)..(22): Pra
  source: /note="C-term Amide"
YCQKWMWTCDSKRACCEGLECGLWCRKII

SEQ ID NO: 158 - protein, 29 aa, Artificial Sequence
  source: /note="Description of Artificial Sequence: Synthetic peptide"
  source: /note="N-term Amino group"
  MOD_RES (23)..(23): Pra
  source: /note="C-term Amide"
YCQKWMWTCDSKRACCEGLECKGWCRKII

SEQ ID NO: 159 - protein, 29 aa, Artificial Sequence
  source: /note="Description of Artificial Sequence: Synthetic peptide"
  source: /note="N-term Amino group"
  MOD_RES (24)..(24): Pra
  source: /note="C-term Amide"
YCQKWMWTCDSKRACCEGLECKLGCRKII

SEQ ID NO: 160 - protein, 29 aa, Artificial Sequence
  source: /note="Description of Artificial Sequence: Synthetic peptide"
  source: /note="N-term Amino group"
  MOD_RES (26)..(26): Pra
  source: /note="C-term Amide"
YCQKWMWTCDSKRACCEGLECKLWCGKII

SEQ ID NO: 161 - protein, 29 aa, Artificial Sequence
  source: /note="Description of Artificial Sequence: Synthetic peptide"
  source: /note="N-term Amino group"
  MOD_RES (27)..(27): Pra
  source: /note="C-term Amide"
YCQKWMWTCDSKRACCEGLECKLWCRGII

SEQ ID NO: 162 - protein, 29 aa, Artificial Sequence
  source: /note="Description of Artificial Sequence: Synthetic peptide"
  source: /note="N-term Amino group"
  MOD_RES (28)..(28): Pra
  source: /note="C-term Amide"
YCQKWMWTCDSKRACCEGLECKLWCRKGI

SEQ ID NO: 163 - protein, 29 aa, Artificial Sequence
  source: /note="Description of Artificial Sequence: Synthetic peptide"
  source: /note="N-term Amino group"
  MOD_RES (29)..(29): Pra
  source: /note="C-term Amide"
YCQKWMWTCDSKRACCEGLECKLWCRKIG

SEQ ID NO: 164 - protein, 29 aa, Artificial Sequence
  source: /note="Description of Artificial Sequence: Synthetic peptide"
  source: /note="N-term 4-Pen
  source: /note="C-term Amide"
YCQKWMWTCDSKRACCEGLECKLWCRKII

SEQ ID NO: 165 - protein, 29 aa, Artificial Sequence
  source: /note="Description of Artificial Sequence: Synthetic peptide"
  source: /note="N-term Amino group"
  MOD_RES (1)..(1): Atz(PEG10)
  source: /note="C-term Amide"
ACQKWMWTCDSKRACCEGLECKLWCRKII

SEQ ID NO: 166 - protein, 29 aa, Artificial Sequence
  source: /note="Description of Artificial Sequence: Synthetic peptide"
  source: /note="N-term Amino group"
  MOD_RES (3)..(3): Atz(PEG10)
  source: /note="C-term Amide"
YCAKWMWTCDSKRACCEGLECKLWCRKII

SEQ ID NO: 167 - protein, 29 aa, Artificial Sequence
  source: /note="Description of Artificial Sequence: Synthetic peptide"
  source: /note="N-term Amino group"
  MOD_RES (4)..(4): Atz(PEG10)
  source: /note="C-term Amide"
YCQAWMWTCDSKRACCEGLECKLWCRKII

SEQ ID NO: 168 - protein, 29 aa, Artificial Sequence
  source: /note="Description of Artificial Sequence: Synthetic peptide"
  source: /note="N-term Amino group"
  MOD_RES (5)..(5): Atz(PEG10)
  source: /note="C-term Amide"
YCQKAMWTCDSKRACCEGLECKLWCRKII

SEQ ID NO: 169 - protein, 29 aa, Artificial Sequence
  source: /note="Description of Artificial Sequence: Synthetic peptide"
  source: /note="N-term Amino group"
  MOD_RES (6)..(6): Atz(PEG10)
  source: /note="C-term Amide"
YCQKWAWTCDSKRACCEGLECKLWCRKII

SEQ ID NO: 170 - protein, 29 aa, Artificial Sequence
  source: /note="Description of Artificial Sequence: Synthetic peptide"
  source: /note="N-term Amino group"
  MOD_RES (7)..(7): Atz(PEG10)
  source: /note="C-term Amide"
YCQKWMATCDSKRACCEGLECKLWCRKII

SEQ ID NO: 171 - protein, 29 aa, Artificial Sequence
  source: /note="Description of Artificial Sequence: Synthetic peptide"
  source: /note="N-term Amino group"
  MOD_RES (8)..(8): Atz(PEG10)
  source: /note="C-term Amide"
YCQKWMWACDSKRACCEGLECKLWCRKII

SEQ ID NO: 172 - protein, 29 aa, Artificial Sequence
  source: /note="Description of Artificial Sequence: Synthetic peptide"
  source: /note="N-term Amino group"
  MOD_RES (9)..(9): Atz(PEG10)
  source: /note="C-term Amide"
YCQKWMWTADSKRACCEGLECKLWCRKII

SEQ ID NO: 173 - protein, 29 aa, Artificial Sequence
  source: /note="Description of Artificial Sequence: Synthetic peptide"
  source: /note="N-term Amino group"
  MOD_RES (10)..(10): Atz(PEG10)
  source: /note="C-term Amide"
YCQKWMWTCASKRACCEGLECKLWCRKII

SEQ ID NO: 174 - protein, 29 aa, Artificial Sequence
  source: /note="Description of Artificial Sequence: Synthetic peptide"
  source: /note="N-term Amino group"
  MOD_RES (11)..(11): Atz(PEG10)
  source: /note="C-term Amide"
YCQKWMWTCDAKRACCEGLECKLWCRKII

SEQ ID NO: 175 - protein, 29 aa, Artificial Sequence
  source: /note="Description of Artificial Sequence: Synthetic peptide"
  source: /note="N-term Amino group"
  MOD_RES (12)..(12): Atz(PEG10)
  source: /note="C-term Amide"
YCQKWMWTCDSARACCEGLECKLWCRKII

SEQ ID NO: 176 - protein, 29 aa, Artificial Sequence
  source: /note="Description of Artificial Sequence: Synthetic peptide"
  source: /note="N-term Amino group"
  MOD_RES (13)..(13): Atz(PEG10)
  source: /note="C-term Amide"
YCQKWMWTCDSKAACCEGLECKLWCRKII

SEQ ID NO: 177 - protein, 29 aa, Artificial Sequence
  source: /note="Description of Artificial Sequence: Synthetic peptide"
  source: /note="N-term Amino group"
  MOD_RES (14)..(14): Atz(PEG10)
  source: /note="C-term Amide"
YCQKWMWTCDSKRACCEGLECKLWCRKII

SEQ ID NO: 178 - protein, 29 aa, Artificial Sequence
  source: /note="Description of Artificial Sequence: Synthetic peptide"
  source: /note="N-term Amino group"
  MOD_RES (17)..(17): Atz(PEG10)
  source: /note="C-term Amide"
YCQKWMWTCDSKRACCAGLECKLWCRKII

SEQ ID NO: 179 - protein, 29 aa, Artificial Sequence
  source: /note="Description of Artificial Sequence: Synthetic peptide"
  source: /note="N-term Amino group"
  MOD_RES (18)..(18): Atz(PEG10)
  source: /note="C-term Amide"
YCQKWMWTCDSKRACCEALECKLWCRKII

SEQ ID NO: 180 - protein, 29 aa, Artificial Sequence
  source: /note="Description of Artificial Sequence: Synthetic peptide"
  source: /note="N-term Amino group"
  MOD_RES (19)..(19): Atz(PEG10)
  source: /note="C-term Amide"
YCQKWMWTCDSKRACCEGAECKLWCRKII

SEQ ID NO: 181 - protein, 29 aa, Artificial Sequence
  source: /note="Description of Artificial Sequence: Synthetic peptide"
  source: /note="N-term Amino group"
  MOD_RES (20)..(20): Atz(PEG10)
  source: /note="C-term Amide"
YCQKWMWTCDSKRACCEGLACKLWCRKII

SEQ ID NO: 182 - protein, 29 aa, Artificial Sequence
  source: /note="Description of Artificial Sequence: Synthetic peptide"
  source: /note="N-term Amino group"
  MOD_RES (22)..(22): Atz(PEG10)
  source: /note="C-term Amide"
YCQKWMWTCDSKRACCEGLECALWCRKII

SEQ ID NO: 183 - protein, 29 aa, Artificial Sequence
  source: /note="Description of Artificial Sequence: Synthetic peptide"
  source: /note="N-term Amino group"
  MOD_RES (23)..(23): Atz(PEG10)
  source: /note="C-term Amide"
YCQKWMWTCDSKRACCEGLECKAWCRKII

SEQ ID NO: 184 - protein, 29 aa, Artificial Sequence
  source: /note="Description of Artificial Sequence: Synthetic peptide"
  source: /note="N-term Amino group"
  MOD_RES (24)..(24): Atz(PEG10)
  source: /note="C-term Amide"
YCQKWMWTCDSKRACCEGLECKLACRKII

SEQ ID NO: 185 - protein, 29 aa, Artificial Sequence
  source: /note="Description of Artificial Sequence: Synthetic peptide"
  source: /note="N-term Amino group"
  MOD_RES (26)..(26): Atz(PEG10)
  source: /note="C-term Amide"
YCQKWMWTCDSKRACCEGLECKLWCAKII

SEQ ID NO: 186 - protein, 29 aa, Artificial Sequence
  source: /note="Description of Artificial Sequence: Synthetic peptide"
  source: /note="N-term Amino group"
  MOD_RES (27)..(27): Atz(PEG10)
  source: /note="C-term Amide"
YCQKWMWTCDSKRACCEGLECKLWCRAII

SEQ ID NO: 187 - protein, 29 aa, Artificial Sequence
  source: /note="Description of Artificial Sequence: Synthetic peptide"
  source: /note="N-term Amino group"
  MOD_RES (28)..(28): Atz(PEG10)
  source: /note="C-term Amide"
YCQKWMWTCDSKRACCEGLECKLWCRKAI

SEQ ID NO: 188 - protein, 29 aa, Artificial Sequence
  source: /note="Description of Artificial Sequence: Synthetic peptide"
  source: /note="N-term Amino group"
  MOD_RES (29)..(29): Atz(PEG10)
  source: /note="C-term Amide"
YCQKWMWTCDSKRACCEGLECKLWCRKIA

SEQ ID NO: 189 - protein, 29 aa, Artificial Sequence
  source: /note="Description of Artificial Sequence: Synthetic peptide"
  source: /note="N-term Amino group"
  MOD_RES (6)..(6): Nle
  source: /note="C-term Amide"
YCQKWLWTCDSKRACCEGLECKLWCRKYI

SEQ ID NO: 190 - protein, 29 aa, Artificial Sequence
  source: /note="Description of Artificial Sequence: Synthetic peptide"
  source: /note="N-term Amino group"
  MOD_RES (5)..(5): 1-Nal
  source: /note="C-term Amide"
YCQKAMWTCDSKRACCEGLECKLWCRKYI

SEQ ID NO: 191 - protein, 29 aa, Artificial Sequence
  source: /note="Description of Artificial Sequence: Synthetic peptide"
  source: /note="N-term Amino group"
  MOD_RES (5)..(5): 2-Nal
  source: /note="C-term Amide"
YCQKAMWTCDSKRACCEGLECKLWCRKYI

SEQ ID NO: 192 - protein, 29 aa, Artificial Sequence
  source: /note="Description of Artificial Sequence: Synthetic peptide"
  source: /note="N-term Amino group"
  MOD_RES (5)..(5): pI-Phe
  source: /note="C-term Amide"
YCQKFMWTCDSKRACCEGLECKLWCRKYI

SEQ ID NO: 193 - protein, 29 aa, Artificial Sequence
  source: /note="Description of Artificial Sequence: Synthetic peptide"
  source: /note="N-term Amino group"
  source: /note="C-term Amide"
YCQKFMWTCDSKRACCEGLECKLWCRKYI

SEQ ID NO: 194 - protein, 29 aa, Artificial Sequence
  source: /note="Description of Artificial Sequence: Synthetic peptide"
  source: /note="N-term Amino group"
  source: /note="C-term Amide"
YCQKYMWTCDSKRACCEGLECKLWCRKYI

SEQ ID NO: 195 - protein, 29 aa, Artificial Sequence
  source: /note="Description of Artificial Sequence: Synthetic peptide"
  source: /note="N-term Amino group"
  source: /note="C-term Amide"
YCQKVMWTCDSKRACCEGLECKLWCRKYI

SEQ ID NO: 196 - protein, 29 aa, Artificial Sequence
  source: /note="Description of Artificial Sequence: Synthetic peptide"
  source: /note="N-term Amino group"
  source: /note="C-term Amide"
YCQKLMWTCDSKRACCEGLECKLWCRKYI

SEQ ID NO: 197 - protein, 29 aa, Artificial Sequence
  source: /note="Description of Artificial Sequence: Synthetic peptide"
  source: /note="N-term Amino group"
  MOD_RES (5)..(5): Nle
  source: /note="C-term Amide"
YCQKLMWTCDSKRACCEGLECKLWCRKYI

SEQ ID NO: 198 - protein, 29 aa, Artificial Sequence
  source: /note="Description of Artificial Sequence: Synthetic peptide"
  source: /note="N-term Amino group"
  MOD_RES (5)..(5): Nva
  source: /note="C-term Amide"
YCQKVMWTCDSKRACCEGLECKLWCRKYI

SEQ ID NO: 199 - protein, 29 aa, Artificial Sequence
  source: /note="Description of Artificial Sequence: Synthetic peptide"
  source: /note="N-term Amino group"
  MOD_RES (5)..(5): Cit
  source: /note="C-term Amide"
YCQKXMWTCDSKRACCEGLECKLWCRKYI

SEQ ID NO: 200 - protein, 29 aa, Artificial Sequence
  source: /note="Description of Artificial Sequence: Synthetic peptide"
  source: /note="N-term Amino group"
  source: /note="C-term Amide"
YCQKKMWTCDSKRACCEGLECKLWCRKYI

SEQ ID NO: 201 - protein, 29 aa, Artificial Sequence
  source: /note="Description of Artificial Sequence: Synthetic peptide"
  source: /note="N-term Amino group"
  source: /note="C-term Amide"
YCQKNMWTCDSKRACCEGLECKLWCRKYI

SEQ ID NO: 202 - protein, 29 aa, Artificial Sequence
  source: /note="Description of Artificial Sequence: Synthetic peptide"
  source: /note="N-term Amino group"
  source: /note="C-term Amide"
YCQKSMWTCDSKRACCEGLECKLWCRKYI

SEQ ID NO: 203 - protein, 29 aa, Artificial Sequence
  source: /note="Description of Artificial Sequence: Synthetic peptide"
  source: /note="N-term Amino group"
  source: /note="C-term Amide"
YCQKEMWTCDSKRACCEGLECKLWCRKYI

SEQ ID NO: 204 - protein, 29 aa, Artificial Sequence
  source: /note="Description of Artificial Sequence: Synthetic peptide"
  source: /note="N-term Amino group"
  MOD_RES (7)..(7): 1-Nal
  source: /note="C-term Amide"
YCQKWMATCDSKRACCEGLECKLWCRKYI

SEQ ID NO: 205 - protein, 29 aa, Artificial Sequence
  source: /note="Description of Artificial Sequence: Synthetic peptide"
  source: /note="N-term Amino group"
  MOD_RES (7)..(7): 2-Nal
  source: /note="C-term Amide"
YCQKWMATCDSKRACCEGLECKLWCRKYI

SEQ ID NO: 206 - protein, 29 aa, Artificial Sequence
  source: /note="Description of Artificial Sequence: Synthetic peptide"
  source: /note="N-term Amino group"
  MOD_RES (7)..(7): pI-Phe
  source: /note="C-term Amide"
YCQKWMFTCDSKRACCEGLECKLWCRKYI

SEQ ID NO: 207 - protein, 29 aa, Artificial Sequence
  source: /note="Description of Artificial Sequence: Synthetic peptide"
  source: /note="N-term Amino group"
  source: /note="C-term Amide"
YCQKWMFTCDSKRACCEGLECKLWCRKYI

SEQ ID NO: 208 - protein, 29 aa, Artificial Sequence
  source: /note="Description of Artificial Sequence: Synthetic peptide"
  source: /note="N-term Amino group"
  source: /note="C-term Amide"
YCQKWMYTCDSKRACCEGLECKLWCRKYI

SEQ ID NO: 209 - protein, 29 aa, Artificial Sequence
  source: /note="Description of Artificial Sequence: Synthetic peptide"
  source: /note="N-term Amino group"
  source: /note="C-term Amide"
YCQKWMVTCDSKRACCEGLECKLWCRKYI

SEQ ID NO: 210 - protein, 29 aa, Artificial Sequence
  source: /note="Description of Artificial Sequence: Synthetic peptide"
  source: /note="N-term Amino group"
  source: /note="C-term Amide"
YCQKWMLTCDSKRACCEGLECKLWCRKYI

SEQ ID NO: 211 - protein, 29 aa, Artificial Sequence
  source: /note="Description of Artificial Sequence: Synthetic peptide"
  source: /note="N-term Amino group"
  MOD_RES (7)..(7): Nle
  source: /note="C-term Amide"
YCQKWMLTCDSKRACCEGLECKLWCRKYI

SEQ ID NO: 212 - protein, 29 aa, Artificial Sequence
  source: /note="Description of Artificial Sequence: Synthetic peptide"
  source: /note="N-term Amino group"
  MOD_RES (7)..(7): Nva
  source: /note="C-term Amide"
YCQKWMVTCDSKRACCEGLECKLWCRKYI

SEQ ID NO: 213 - protein, 29 aa, Artificial Sequence
  source: /note="Description of Artificial Sequence: Synthetic peptide"
  source: /note="N-term Amino group"
  MOD_RES (7)..(7): Cit
  source: /note="C-term Amide"
YCQKWMXTCDSKRACCEGLECKLWCRKYI

SEQ ID NO: 214 - protein, 29 aa, Artificial Sequence
  source: /note="Description of Artificial Sequence: Synthetic peptide"
  source: /note="N-term Amino group"
  source: /note="C-term Amide"
YCQKWMKTCDSKRACCEGLECKLWCRKYI

SEQ ID NO: 215 - protein, 29 aa, Artificial Sequence
  source: /note="Description of Artificial Sequence: Synthetic peptide"
  source: /note="N-term Amino group"
  source: /note="C-term Amide"
YCQKWMNTCDSKRACCEGLECKLWCRKYI

SEQ ID NO: 216 - protein, 29 aa, Artificial Sequence
  source: /note="Description of Artificial Sequence: Synthetic peptide"
  source: /note="N-term Amino group"
  source: /note="C-term Amide"
YCQKWMSTCDSKRACCEGLECKLWCRKYI

SEQ ID NO: 217 - protein, 29 aa, Artificial Sequence
  source: /note="Description of Artificial Sequence: Synthetic peptide"
  source: /note="N-term Amino group"
  source: /note="C-term Amide"
YCQKWMETCDSKRACCEGLECKLWCRKYI

SEQ ID NO: 218 - protein, 29 aa, Artificial Sequence
  source: /note="Description of Artificial Sequence: Synthetic peptide"
  source: /note="N-term Amino group"
  MOD_RES (24)..(24): 1-Nal
  source: /note="C-term Amide"
YCQKWMWTCDSKRACCEGLECKLACRKYI

SEQ ID NO: 219 - protein, 29 aa, Artificial Sequence
  source: /note="Description of Artificial Sequence: Synthetic peptide"
  source: /note="N-term Amino group"
  MOD_RES (24)..(24): 2-Nal
  source: /note="C-term Amide"
YCQKWMWTCDSKRACCEGLECKLACRKYI

SEQ ID NO: 220 - protein, 29 aa, Artificial Sequence
  source: /note="Description of Artificial Sequence: Synthetic peptide"
  source: /note="N-term Amino group"
  MOD_RES (24)..(24): pI-Phe
  source: /note="C-term Amide"
YCQKWMWTCDSKRACCEGLECKLFCRKYI

SEQ ID NO: 221 - protein, 29 aa, Artificial Sequence
  source: /note="Description of Artificial Sequence: Synthetic peptide"
  source: /note="N-term Amino group"
  source: /note="C-term Amide"
YCQKWMWTCDSKRACCEGLECKLFCRKYI

SEQ ID NO: 222 - protein, 29 aa, Artificial Sequence
  source: /note="Description of Artificial Sequence: Synthetic peptide"
  source: /note="N-term Amino group"
  source: /note="C-term Amide"
YCQKWMWTCDSKRACCEGLECKLYCRKYI

SEQ ID NO: 223 - protein, 29 aa, Artificial Sequence
  source: /note="Description of Artificial Sequence: Synthetic peptide"
  source: /note="N-term Amino group"
  source: /note="C-term Amide"
YCQKWMWTCDSKRACCEGLECKLVCRKYI

SEQ ID NO: 224 - protein, 29 aa, Artificial Sequence
  source: /note="Description of Artificial Sequence: Synthetic peptide"
  source: /note="N-term Amino group"
  source: /note="C-term Amide"
YCQKWMWTCDSKRACCEGLECKLLCRKYI

SEQ ID NO: 225 - protein, 29 aa, Artificial Sequence
  source: /note="Description of Artificial Sequence: Synthetic peptide"
  source: /note="N-term Amino group"
  MOD_RES (24)..(24): Nle
  source: /note="C-term Amide"
YCQKWMWTCDSKRACCEGLECKLLCRKYI

SEQ ID NO: 226 - protein, 29 aa, Artificial Sequence
  source: /note="Description of Artificial Sequence: Synthetic peptide"
  source: /note="N-term Amino group"
  MOD_RES (24)..(24): Nva
  source: /note="C-term Amide"
YCQKWMWTCDSKRACCEGLECKLVCRKYI

SEQ ID NO: 227 - protein, 29 aa, Artificial Sequence
  source: /note="Description of Artificial Sequence: Synthetic peptide"
  source: /note="N-term Amino group"
  MOD_RES (24)..(24): Cit
  source: /note="C-term Amide"
YCQKWMWTCDSKRACCEGLECKLXCRKYI

SEQ ID NO: 228 - protein, 29 aa, Artificial Sequence
  source: /note="Description of Artificial Sequence: Synthetic peptide"
  source: /note="N-term Amino group"
  source: /note="C-term Amide"
YCQKWMWTCDSKRACCEGLECKLKCRKYI

SEQ ID NO: 229 - protein, 29 aa, Artificial Sequence
  source: /note="Description of Artificial Sequence: Synthetic peptide"
  source: /note="N-term Amino group"
  source: /note="C-term Amide"
YCQKWMWTCDSKRACCEGLECKLNCRKYI

SEQ ID NO: 230 - protein, 29 aa, Artificial Sequence
  source: /note="Description of Artificial Sequence: Synthetic peptide"
  source: /note="N-term Amino group"
  source: /note="C-term Amide"
YCQKWMWTCDSKRACCEGLECKLSCRKYI

SEQ ID NO: 231 - protein, 29 aa, Artificial Sequence
  source: /note="Description of Artificial Sequence: Synthetic peptide"
  source: /note="N-term Amino group"
  source: /note="C-term Amide"
YCQKWMWTCDSKRACCEGLECKLECRKYI

SEQ ID NO: 232 - protein, 29 aa, Artificial Sequence
  source: /note="Description of Artificial Sequence: Synthetic peptide"
  source: /note="N-term Amino group"
  MOD_RES (29)..(29): 1-Nal
  source: /note="C-term Amide"
YCQKWMWTCDSKRACCEGLECKLWCRKYA

SEQ ID NO: 233 - protein, 29 aa, Artificial Sequence
  source: /note="Description of Artificial Sequence: Synthetic peptide"
  source: /note="N-term Amino group"
  MOD_RES (29)..(29): 2-Nal
  source: /note="C-term Amide"
YCQKWMWTCDSKRACCEGLECKLWCRKYA

SEQ ID NO: 234 - protein, 29 aa, Artificial Sequence
  source: /note="Description of Artificial Sequence: Synthetic peptide"
  source: /note="N-term Amino group"
  MOD_RES (29)..(29): pI-Phe
  source: /note="C-term Amide"
YCQKWMWTCDSKRACCEGLECKLWCRKYF

SEQ ID NO: 235 - protein, 29 aa, Artificial Sequence
  source: /note="Description of Artificial Sequence: Synthetic peptide"
  source: /note="N-term Amino group"
  source: /note="C-term Amide"
YCQKWMWTCDSKRACCEGLECKLWCRKYF

SEQ ID NO: 236 - protein, 29 aa, Artificial Sequence
  source: /note="Description of Artificial Sequence: Synthetic peptide"
  source: /note="N-term Amino group"
  source: /note="C-term Amide"
YCQKWMWTCDSKRACCEGLECKLWCRKYY

SEQ ID NO: 237 - protein, 29 aa, Artificial Sequence
  source: /note="Description of Artificial Sequence: Synthetic peptide"
  source: /note="N-term Amino group"
  source: /note="C-term Amide"
YCQKWMWTCDSKRACCEGLECKLWCRKYV

SEQ ID NO: 238 - protein, 29 aa, Artificial Sequence
  source: /note="Description of Artificial Sequence: Synthetic peptide"
  source: /note="N-term Amino group"
  source: /note="C-term Amide"
YCQKWMWTCDSKRACCEGLECKLWCRKYL

SEQ ID NO: 239 - protein, 29 aa, Artificial Sequence
  source: /note="Description of Artificial Sequence: Synthetic peptide"
  source: /note="N-term Amino group"
  MOD_RES (29)..(29): Nle
  source: /note="C-term Amide"
YCQKWMWTCDSKRACCEGLECKLWCRKYL

SEQ ID NO: 240 - protein, 29 aa, Artificial Sequence
  source: /note="Description of Artificial Sequence: Synthetic peptide"
  source: /note="N-term Amino group"
  MOD_RES (29)..(29): Nva
  source: /note="C-term Amide"
YCQKWMWTCDSKRACCEGLECKLWCRKYV

SEQ ID NO: 241 - protein, 29 aa, Artificial Sequence
  source: /note="Description of Artificial Sequence: Synthetic peptide"
  source: /note="N-term Amino group"
  MOD_RES (29)..(29): Cit
  source: /note="C-term Amide"
YCQKWMWTCDSKRACCEGLECKLWCRKYX

SEQ ID NO: 242 - protein, 29 aa, Artificial Sequence
  source: /note="Description of Artificial Sequence: Synthetic peptide"
  source: /note="N-term Amino group"
  source: /note="C-term Amide"
YCQKWMWTCDSKRACCEGLECKLWCRKYK

SEQ ID NO: 243 - protein, 29 aa, Artificial Sequence
  source: /note="Description of Artificial Sequence: Synthetic peptide"
  source: /note="N-term Amino group"
  source: /note="C-term Amide"
YCQKWMWTCDSKRACCEGLECKLWCRKYN

SEQ ID NO: 244 - protein, 29 aa, Artificial Sequence
  source: /note="Description of Artificial Sequence: Synthetic peptide"
  source: /note="N-term Amino group"
  source: /note="C-term Amide"
YCQKWMWTCDSKRACCEGLECKLWCRKYS

SEQ ID NO: 245 - protein, 29 aa, Artificial Sequence
  source: /note="Description of Artificial Sequence: Synthetic peptide"
  source: /note="N-term Amino group"
  source: /note="C-term Amide"
YCQKWMWTCDSKRACCEGLECKLWCRKYE

SEQ ID NO: 246 - protein, 29 aa, Artificial Sequence
  source: /note="Description of Artificial Sequence: Synthetic peptide"
  source: /note="N-term Amino group"
  source: /note="C-term Amide"
YCQKWMWTCDSKRACCEGLECKLWCRKYW

SEQ ID NO: 247 - protein, 30 aa, Artificial Sequence
  source: /note="Description of Artificial Sequence: Synthetic polypeptide"
  source: /note="N-term Amino group"
  MOD_RES (1)..(1): Atz(PEG10)
  MOD_RES (7)..(7): Nle
  source: /note="C-term Amide"
AYCQKWLWTCDSKRACCEGLRCKLWCRKII

SEQ ID NO: 248 - protein, 29 aa, Artificial Sequence
  source: /note="Description of Artificial Sequence: Synthetic peptide"
  source: /note="N-term Amino group"
  MOD_RES (1)..(1): Atz(PEG10)
  MOD_RES (6)..(6): Nle
  source: /note="C-term Amide"
ACQKWLWTCDSKRACCEGLRCKLWCRKII

SEQ ID NO: 249 - protein, 29 aa, Artificial Sequence
  source: /note="Description of Artificial Sequence: Synthetic peptide"
  source: /note="N-term Amino group"
  MOD_RES (3)..(3): Atz(PEG10)
  MOD_RES (6)..(6): Nle
  source: /note="C-term Amide"
YCAKWLWTCDSKRACCEGLRCKLWCRKII

SEQ ID NO: 250 - protein, 29 aa, Artificial Sequence
  source: /note="Description of Artificial Sequence: Synthetic peptide"
  source: /note="N-term Amino group"
  MOD_RES (4)..(4): Atz(PEG10)
  MOD_RES (6)..(6): Nle
  source: /note="C-term Amide"
YCQAWLWTCDSKRACCEGLRCKLWCRKII

SEQ ID NO: 251 - protein, 29 aa, Artificial Sequence
  source: /note="Description of Artificial Sequence: Synthetic peptide"
  source: /note="N-term Amino group"
  MOD_RES (5)..(5): Atz(PEG10)
  MOD_RES (6)..(6): Nle
  source: /note="C-term Amide"
YCQKALWTCDSKRACCEGLRCKLWCRKII

SEQ ID NO: 252 - protein, 29 aa, Artificial Sequence
  source: /note="Description of Artificial Sequence: Synthetic peptide"
  source: /note="N-term Amino group"
  MOD_RES (6)..(6): Atz(PEG10)
  source: /note="C-term Amide"
YCQKWAWTCDSKRACCEGLRCKLWCRKII

SEQ ID NO: 253 - protein, 29 aa, Artificial Sequence
  source: /note="Description of Artificial Sequence: Synthetic peptide"
  source: /note="N-term Amino group"
  MOD_RES (6)..(6): Nle
  MOD_RES (7)..(7): Atz(PEG10)
  source: /note="C-term Amide"
YCQKWLATCDSKRACCEGLRCKLWCRKII

SEQ ID NO: 254 - protein, 29 aa, Artificial Sequence
  source: /note="Description of Artificial Sequence: Synthetic peptide"
  source: /note="N-term Amino group"
  MOD_RES (6)..(6): Nle
  MOD_RES (8)..(8): Atz(PEG10)
  source: /note="C-term Amide"
YCQKWLWACDSKRACCEGLRCKLWCRKII

SEQ ID NO: 255 - protein, 29 aa, Artificial Sequence
  source: /note="Description of Artificial Sequence: Synthetic peptide"
  source: /note="N-term Amino group"
  MOD_RES (6)..(6): Nle
  MOD_RES (10)..(10): Atz(PEG10)
  source: /note="C-term Amide"
YCQKWLWTCASKRACCEGLRCKLWCRKII

SEQ ID NO: 256 - protein, 29 aa, Artificial Sequence
  source: /note="Description of Artificial Sequence: Synthetic peptide"
  source: /note="N-term Amino group"
  MOD_RES (6)..(6): Nle
  MOD_RES (11)..(11): Atz(PEG10)
  source: /note="C-term Amide"
YCQKWLWTCDAKRACCEGLRCKLWCRKII

SEQ ID NO: 257 - protein, 29 aa, Artificial Sequence
  source: /note="Description of Artificial Sequence: Synthetic peptide"
  source: /note="N-term Amino group"
  MOD_RES (6)..(6): Nle
  MOD_RES (12)..(12): Atz(PEG10)
  source: /note="C-term Amide"
YCQKWLWTCDSARACCEGLRCKLWCRKII

SEQ ID NO: 258 - protein, 29 aa, Artificial Sequence
  source: /note="Description of Artificial Sequence: Synthetic peptide"
  source: /note="N-term Amino group"
  MOD_RES (6)..(6): Nle
  MOD_RES (13)..(13): Atz(PEG10)
  source: /note="C-term Amide"
YCQKWLWTCDSKAACCEGLRCKLWCRKII

SEQ ID NO: 259 - protein, 29 aa, Artificial Sequence
  source: /note="Description of Artificial Sequence: Synthetic peptide"
  source: /note="N-term Amino group"
  MOD_RES (6)..(6): Nle
  MOD_RES (14)..(14): Atz(PEG10)
  source: /note="C-term Amide"
YCQKWLWTCDSKRACCEGLRCKLWCRKII

SEQ ID NO: 260 - protein, 29 aa, Artificial Sequence
  source: /note="Description of Artificial Sequence: Synthetic peptide"
  source: /note="N-term Amino group"
  MOD_RES (6)..(6): Nle
  MOD_RES (17)..(17): Atz(PEG10)
  source: /note="C-term Amide"
YCQKWLWTCDSKRACCAGLRCKLWCRKII

SEQ ID NO: 261 - protein, 29 aa, Artificial Sequence
  source: /note="Description of Artificial Sequence: Synthetic peptide"
  source: /note="N-term Amino group"
  MOD_RES (6)..(6): Nle
  MOD_RES (18)..(18): Atz(PEG10)
  source: /note="C-term Amide"
YCQKWLWTCDSKRACCEALRCKLWCRKII

SEQ ID NO: 262 - protein, 29 aa, Artificial Sequence
  source: /note="Description of Artificial Sequence: Synthetic peptide"
  source: /note="N-term Amino group"
  MOD_RES (6)..(6): Nle
  MOD_RES (19)..(19): Atz(PEG10)
  source: /note="C-term Amide"
YCQKWLWTCDSKRACCEGARCKLWCRKII

SEQ ID NO: 263 - protein, 29 aa, Artificial Sequence
  source: /note="Description of Artificial Sequence: Synthetic peptide"
  source: /note="N-term Amino group"
  MOD_RES (6)..(6): Nle
  MOD_RES (20)..(20): Atz(PEG10)
  source: /note="C-term Amide"
YCQKWLWTCDSKRACCEGLACKLWCRKII

SEQ ID NO: 264 - protein, 29 aa, Artificial Sequence
  source: /note="Description of Artificial Sequence: Synthetic peptide"
  source: /note="N-term Amino group"
  MOD_RES (6)..(6): Nle
  MOD_RES (22)..(22): Atz(PEG10)
  source: /note="C-term Amide"
YCQKWLWTCDSKRACCEGLRCALWCRKII

SEQ ID NO: 265 - protein, 29 aa, Artificial Sequence
  source: /note="Description of Artificial Sequence: Synthetic peptide"
  source: /note="N-term Amino group"
  MOD_RES (6)..(6): Nle
  MOD_RES (23)..(23): Atz(PEG10)
  source: /note="C-term Amide"
YCQKWLWTCDSKRACCEGLRCKAWCRKII

SEQ ID NO: 266 - protein, 29 aa, Artificial Sequence
  source: /note="Description of Artificial Sequence: Synthetic peptide"
  source: /note="N-term Amino group"
  MOD_RES (6)..(6): Nle
  MOD_RES (24)..(24): Atz(PEG10)
  source: /note="C-term Amide"
YCQKWLWTCDSKRACCEGLRCKLACRKII

SEQ ID NO: 267 - protein, 29 aa, Artificial Sequence
  source: /note="Description of Artificial Sequence: Synthetic peptide"
  source: /note="N-term Amino group"
  MOD_RES (6)..(6): Nle
  MOD_RES (26)..(26): Atz(PEG10)
  source: /note="C-term Amide"
YCQKWLWTCDSKRACCEGLRCKLWCAKII

SEQ ID NO: 268 - protein, 29 aa, Artificial Sequence
  source: /note="Description of Artificial Sequence: Synthetic peptide"
  source: /note="N-term Amino group"
  MOD_RES (6)..(6): Nle
  MOD_RES (27)..(27): Atz(PEG10)
  source: /note="C-term Amide"
YCQKWLWTCDSKRACCEGLRCKLWCRAII

SEQ ID NO: 269 - protein, 29 aa, Artificial Sequence
  source: /note="Description of Artificial Sequence: Synthetic peptide"
  source: /note="N-term Amino group"
  MOD_RES (6)..(6): Nle
  MOD_RES (28)..(28): Atz(PEG10)
  source: /note="C-term Amide"
YCQKWLWTCDSKRACCEGLRCKLWCRKAI

SEQ ID NO: 270 - protein, 29 aa, Artificial Sequence
  source: /note="Description of Artificial Sequence: Synthetic peptide"
  source: /note="N-term Amino group"
  MOD_RES (6)..(6): Nle
  MOD_RES (29)..(29): Atz(PEG10)
  source: /note="C-term Amide"
YCQKWLWTCDSKRACCEGLRCKLWCRKIA

SEQ ID NO: 271 - protein, 30 aa, Artificial Sequence
  source: /note="Description of Artificial Sequence: Synthetic polypeptide"
  source: /note="N-term Amino group"
  MOD_RES (6)..(6): Nle
  MOD_RES (30)..(30): Atz(PEG10)
  source: /note="C-term Amide"
YCQKWLWTCDSKRACCEGLRCKLWCRKIIA

SEQ ID NO: 272 - protein, 29 aa, Artificial Sequence
  source: /note="Description of Artificial Sequence: Synthetic peptide"
  source: /note="N-term Amino group"
  MOD_RES (6)..(6): Nle
  source: /note="C-term Amide"
YCQKWLWTCDSKRACCEGLRCKLWCRKII

SEQ ID NO: 273 - protein, 29 aa, Artificial Sequence
  source: /note="Description of Artificial Sequence: Synthetic peptide"
  source: /note="N-term Amino group"
  MOD_RES (6)..(6): Nle
  source: /note="C-term Amide"
YCQKWLWTCDSKRACCEGLECKLWCRKII

SEQ ID NO: 274 - protein, 29 aa, Artificial Sequence
  source: /note="Description of Artificial Sequence: Synthetic peptide"
  source: /note="N-term Amino group"
  MOD_RES (6)..(6): Nle
  source: /note="C-term Amide"
YCQKWLWTCDSKRACCEGLECKLWCRKIW

SEQ ID NO: 275 - protein, 29 aa, Artificial Sequence
  source: /note="Description of Artificial Sequence: Synthetic peptide"
  source: /note="N-term Amino group"
  MOD_RES (6)..(6): Nle
  source: /note="C-term Amide"
YCQKWLWTCDSKRACCEGLECKLWCRKSI

SEQ ID NO: 276 - protein, 29 aa, Artificial Sequence
  source: /note="Description of Artificial Sequence: Synthetic peptide"
  source: /note="N-term Amino group"
  source: /note="C-term Amide"
YCQKWMWTCDSKRACCEGLECKLWCRKSW

SEQ ID NO: 277 - protein, 29 aa, Artificial Sequence
  source: /note="Description of Artificial Sequence: Synthetic peptide"
  source: /note="N-term Amino group"
  source: /note="C-term Amide"
ECQKWMWTCDSKRACCEGLECKLWCRKYI

SEQ ID NO: 278 - protein, 29 aa, Artificial Sequence
  source: /note="Description of Artificial Sequence: Synthetic peptide"
  source: /note="N-term Amino group"
  source: /note="C-term Amide"
ECQKWMWTCDSKRACCEGLRCKLWCRKYI

SEQ ID NO: 279 - protein, 29 aa, Artificial Sequence
  source: /note="Description of Artificial Sequence: Synthetic peptide"
  source: /note="N-term Amino group"
  source: /note="C-term Amide"
ECQKWMWTCDSKRACCEGLECKLWCRKYW

SEQ ID NO: 280 - protein, 29 aa, Artificial Sequence
  source: /note="Description of Artificial Sequence: Synthetic peptide"
  source: /note="N-term Amino group"
  source: /note="C-term Amide"
ECQKWMWTCDSKRACCEGLRCKLWCRKYW

SEQ ID NO: 281 - protein, 29 aa, Artificial Sequence
  source: /note="Description of Artificial Sequence: Synthetic peptide"
  source: /note="N-term Amino group"
  MOD_RES (7)..(7): 1-Nal
  source: /note="C-term Amide"
ECQKWMATCDSKRACCEGLRCKLWCRKII

SEQ ID NO: 282 - protein, 29 aa, Artificial Sequence
  source: /note="Description of Artificial Sequence: Synthetic peptide"
  source: /note="N-term Amino group"
  MOD_RES (7)..(7): 1-Nal
  source: /note="C-term Amide"
ECQKWMATCDSKRACCEGLRCKLWCRKIW

SEQ ID NO: 283 - protein, 29 aa, Artificial Sequence
  source: /note="Description of Artificial Sequence: Synthetic peptide"
  source: /note="N-term Amino group"
  MOD_RES (6)..(6): Nle
  MOD_RES (14)..(14): Pra
  source: /note="C-term Amide"
YCQKWLWTCDSKRGCCEGLRCKLWCRKII

SEQ ID NO: 284 - protein, 29 aa, Artificial Sequence
  source: /note="Description of Artificial Sequence: Synthetic peptide"
  source: /note="N-term Amino group"
  MOD_RES (6)..(6): Nle
  MOD_RES (17)..(17): Pra
  source: /note="C-term Amide"
YCQKWLWTCDSKRACCGGLECKLWCRKIW

SEQ ID NO: 285 - protein, 29 aa, Artificial Sequence
  source: /note="Description of Artificial Sequence: Synthetic peptide"
  source: /note="N-term Amino group"
  MOD_RES (6)..(6): Nle
  MOD_RES (12)..(12): Lys(ivDde)
  source: /note="C-term Amide"
YCQKWLWTCDSKRKCCEGLECKLWCRKIW

SEQ ID NO: 286 - protein, 29 aa, Artificial Sequence
  source: /note="Description of Artificial Sequence: Synthetic peptide"
  source: /note="N-term Amino group"
  MOD_RES (6)..(6): Nle
  MOD_RES (14)..(14): Lys(Pra-Ahx)
  source: /note="C-term Amide"
YCQKWLWTCDSKRKCCEGLECKLWCRKIW

SEQ ID NO: 287 - protein, 29 aa, Artificial Sequence
  source: /note="Description of Artificial Sequence: Synthetic peptide"
  source: /note="N-term Amino group"
  MOD_RES (6)..(6): Nle
  MOD_RES (14)..(14): Lys(Pra)
  source: /note="C-term Amide"
YCQKWLWTCDSKRKCCEGLECKLWCRKIW

SEQ ID NO: 288 - protein, 29 aa, Artificial Sequence
  source: /note="Description of Artificial Sequence: Synthetic peptide"
  source: /note="N-term Amino group"
  MOD_RES (6)..(6): Nle
  MOD_RES (14)..(14): Lys(ivDde)
  source: /note="C-term Amide"
YCQKWLWTCDSKRKCCEGLECKLWCRKIW

SEQ ID NO: 289 - protein, 29 aa, Artificial Sequence
  source: /note="Description of Artificial Sequence: Synthetic peptide"
  source: /note="N-term Amino group"
  MOD_RES (6)..(6): Nle
  MOD_RES (17)..(17): Lys(ivDde)
  source: /note="C-term Amide"
YCQKWLWTCDSKRACCKGLECKLWCRKIW

SEQ ID NO: 290 - protein, 29 aa, Artificial Sequence
  source: /note="Description of Artificial Sequence: Synthetic peptide"
  source: /note="N-term Amino group"
  MOD_RES (6)..(6): Nle
  MOD_RES (14)..(14): KPPG11
  source: /note="C-term Amide"
YCQKWLWTCDSKRKCCEGLECKLWCRKIW

SEQ ID NO: 291 - protein, 29 aa, Artificial Sequence
  source: /note="Description of Artificial Sequence: Synthetic peptide"
  source: /note="N-term Amino group"
  MOD_RES (6)..(6): Nle
  MOD_RES (14)..(14): KPPG3
  source: /note="C-term Amide"
YCQKWLWTCDSKRKCCEGLECKLWCRKIW

SEQ ID NO: 292 - protein, 29 aa, Artificial Sequence
  source: /note="Description of Artificial Sequence: Synthetic peptide"
  source: /note="N-term Amino group"
  MOD_RES (6)..(6): Nle
  MOD_RES (17)..(17): KPPG11
  source: /note="C-term Amide"
YCQKWLWTCDSKRACCKGLECKLWCRKIW

SEQ ID NO: 293 - protein, 29 aa, Artificial Sequence
  source: /note="Description of Artificial Sequence: Synthetic peptide"
  source: /note="N-term Amino group"
  MOD_RES (6)..(6): Nle
  MOD_RES (17)..(17): KPPG3
  source: /note="C-term Amide"
YCQKWLWTCDSKRACCKGLECKLWCRKIW

SEQ ID NO: 294 - protein, 29 aa, Artificial Sequence
  source: /note="Description of Artificial Sequence: Synthetic peptide"
  source: /note="N-term Amino group"
  MOD_RES (6)..(6): Nle
  source: /note="C-term Amide"
YCQKWLWTCDSKRACCEGLECKLWCRKIW

SEQ ID NO: 295 - protein, 30 aa, Artificial Sequence
  source: /note="Description of Artificial Sequence: Synthetic polypeptide"
  source: /note="N-term Amino group"
  MOD_RES (1)..(1): Pra
  source: /note="C-term Amide"
GYCQKWMWTCDSKRACCEGLECKLWCRKIW

SEQ ID NO: 296 - protein, 30 aa, Artificial Sequence
  source: /note="Description of Artificial Sequence: Synthetic polypeptide"
  source: /note="N-term Amino group"
  MOD_RES (1)..(1): Pra
  MOD_RES (7)..(7): Nle
  source: /note="C-term Amide"
GYCQKWLWTCDSKRACCEGLRCKLWCRKIW

SEQ ID NO: 297 - protein, 30 aa, Artificial Sequence
  source: /note="Description of Artificial Sequence: Synthetic polypeptide"
  source: /note="N-term Amino group"
  MOD_RES (1)..(1): Pra
  MOD_RES (7)..(7): Nle
  source: /note="C-term Amide"
GYCQKWLWTCDSKRACCEGLECKLWCRKII

SEQ ID NO: 298 - protein, 30 aa, Artificial Sequence
  source: /note="Description of Artificial Sequence: Synthetic polypeptide"
  source: /note="N-term Amino group"
  MOD_RES (1)..(1): Pra
  source: /note="C-term Amide"
GYCQKWFWTCDSKRACCEGLECKLWCRKIW

SEQ ID NO: 299 - protein, 30 aa, Artificial Sequence
  source: /note="Description of Artificial Sequence: Synthetic polypeptide"
  source: /note="N-term Amino group"
  MOD_RES (1)..(1): Pra
  source: /note="C-term Amide"
GYCQKWLWTCDSKRACCEGLECKLWCRKIW

SEQ ID NO: 300 - protein, 30 aa, Artificial Sequence
  source: /note="Description of Artificial Sequence: Synthetic polypeptide"
  source: /note="N-term Amino group"
  MOD_RES (1)..(1): Pra
  MOD_RES (7)..(7): Nva
  source: /note="C-term Amide"
GYCQKWVWTCDSKRACCEGLECKLWCRKIW

SEQ ID NO: 301 - protein, 30 aa, Artificial Sequence
  source: /note="Description of Artificial Sequence: Synthetic polypeptide"
  source: /note="N-term Amino group"
  MOD_RES (1)..(1): Pra
  MOD_RES (7)..(7): Nle
  source: /note="C-term Amide"
GYCQKWLWTCDSKRACCEGLECKLWCRKIF

SEQ ID NO: 302 - protein, 29 aa, Artificial Sequence
  source: /note="Description of Artificial Sequence: Synthetic peptide"
  source: /note="N-term Amino group"
  MOD_RES (6)..(6): Nle
  MOD_RES (11)..(11): Pra
  source: /note="C-term Amide"
YCQKWLWTCDGKRACCEGLECKLWCRKIW

SEQ ID NO: 303 - protein, 30 aa, Artificial Sequence
  source: /note="Description of Artificial Sequence: Synthetic polypeptide"
  source: /note="N-term Amino group"
  MOD_RES (1)..(1): AzLys
  MOD_RES (7)..(7): Nle
  source: /note="C-term Amide"
KYCQKWLWTCDSKRACCEGLECKLWCRKIW

SEQ ID NO: 304 - protein, 29 aa, Artificial Sequence
  source: /note="Description of Artificial Sequence: Synthetic peptide"
  source: /note="N-term Amino group"
  MOD_RES (1)..(1): AzLys
  MOD_RES (6)..(6): Nle
  source: /note="C-term Amide"
KCQKWLWTCDSKRACCEGLECKLWCRKIW

SEQ ID NO: 305 - protein, 29 aa, Artificial Sequence
  source: /note="Description of Artificial Sequence: Synthetic peptide"
  source: /note="N-term Amino group"
  MOD_RES (6)..(6): Nle
  MOD_RES (11)..(11): AzLys
  source: /note="C-term Amide"
YCQKWLWTCDKKRACCEGLECKLWCRKIW

SEQ ID NO: 306 - protein, 29 aa, Artificial Sequence
  source: /note="Description of Artificial Sequence: Synthetic peptide"
  source: /note="N-term Amino group"
  MOD_RES (6)..(6): Nle
  MOD_RES (14)..(14): AzLys
  source: /note="C-term Amide"
YCQKWLWTCDSKRKCCEGLECKLWCRKIW

SEQ ID NO: 307 - protein, 29 aa, Artificial Sequence
  source: /note="Description of Artificial Sequence: Synthetic peptide"
  source: /note="N-term Amino group"
  MOD_RES (6)..(6): Nle
  MOD_RES (17)..(17): AzLys
  source: /note="C-term Amide"
YCQKWLWTCDSKRACCKGLECKLWCRKIW

SEQ ID NO: 308 - protein, 30 aa, Artificial Sequence
  source: /note="Description of Artificial Sequence: Synthetic polypeptide"
  source: /note="N-term Amino group"
  MOD_RES (1)..(1): Aha
  MOD_RES (7)..(7): Nle
  source: /note="C-term Amide"
AYCQKWLWTCDSKRACCEGLECKLWCRKIW

SEQ ID NO: 309 - protein, 29 aa, Artificial Sequence
  source: /note="Description of Artificial Sequence: Synthetic peptide"
  source: /note="N-term Amino group"
  MOD_RES (1)..(1): Aha
  MOD_RES (6)..(6): Nle
  source: /note="C-term Amide"
ACQKWLWTCDSKRACCEGLECKLWCRKIW

SEQ ID NO: 310 - protein, 29 aa, Artificial Sequence
  source: /note="Description of Artificial Sequence: Synthetic peptide"
  source: /note="N-term Amino group"
  MOD_RES (6)..(6): Nle
  MOD_RES (11)..(11): Aha
  source: /note="C-term Amide"
YCQKWLWTCDAKRACCEGLECKLWCRKIW

SEQ ID NO: 311 - protein, 29 aa, Artificial Sequence
  source: /note="Description of Artificial Sequence: Synthetic peptide"
  source: /note="N-term Amino group"
  MOD_RES (6)..(6): Nle
  MOD_RES (14)..(14): Aha
  source: /note="C-term Amide"
YCQKWLWTCDSKRACCEGLECKLWCRKIW

SEQ ID NO: 312 - protein, 29 aa, Artificial Sequence
  source: /note="Description of Artificial Sequence: Synthetic peptide"
  source: /note="N-term Amino group"
  MOD_RES (6)..(6): Nle
  MOD_RES (17)..(17): Aha
  source: /note="C-term Amide"
YCQKWLWTCDSKRACCAGLECKLWCRKIW

SEQ ID NO: 313 - protein, 30 aa, Artificial Sequence
  source: /note="Description of Artificial Sequence: Synthetic polypeptide"
  source: /note="N-term Amino group"
  MOD_RES (1)..(1): Pra
  MOD_RES (7)..(7): Nle
  source: /note="C-term Amide"
GYCQKWLWTCDSKRACCEGLECKLWCRKYI

SEQ ID NO: 314 - protein, 29 aa, Artificial Sequence
  source: /note="Description of Artificial Sequence: Synthetic peptide"
  source: /note="N-term Amino group"
  MOD_RES (1)..(1): Pra
  MOD_RES (6)..(6): Nle
  source: /note="C-term Amide"
GCQKWLWTCDSKRACCEGLECKLWCRKYI

SEQ ID NO: 315 - protein, 29 aa, Artificial Sequence
  source: /note="Description of Artificial Sequence: Synthetic peptide"
  source: /note="N-term Amino group"
  MOD_RES (6)..(6): Nle
  MOD_RES (11)..(11): Pra
  source: /note="C-term Amide"
YCQKWLWTCDGKRACCEGLECKLWCRKYI

SEQ ID NO: 316 - protein, 29 aa, Artificial Sequence
  source: /note="Description of Artificial Sequence: Synthetic peptide"
  source: /note="N-term Amino group"
  MOD_RES (6)..(6): Nle
  MOD_RES (14)..(14): Pra
  source: /note="C-term Amide"
YCQKWLWTCDSKRGCCEGLECKLWCRKYI

SEQ ID NO: 317 - protein, 29 aa, Artificial Sequence
  source: /note="Description of Artificial Sequence: Synthetic peptide"
  source: /note="N-term Amino group"
  MOD_RES (6)..(6): Nle
  MOD_RES (17)..(17): Pra
  source: /note="C-term Amide"
YCQKWLWTCDSKRACCGGLECKLWCRKYI

SEQ ID NO: 318 - protein, 30 aa, Artificial Sequence
  source: /note="Description of Artificial Sequence: Synthetic polypeptide"
  source: /note="N-term Amino group"
  MOD_RES (1)..(1): AzLys
  MOD_RES (7)..(7): Nle
  source: /note="C-term Amide"
KYCQKWLWTCDSKRACCEGLECKLWCRKYI

SEQ ID NO: 319 - protein, 29 aa, Artificial Sequence
  source: /note="Description of Artificial Sequence: Synthetic peptide"
  source: /note="N-term Amino group"
  MOD_RES (1)..(1): AzLys
  MOD_RES (6)..(6): Nle
  source: /note="C-term Amide"
KCQKWLWTCDSKRACCEGLECKLWCRKYI

SEQ ID NO: 320 - protein, 29 aa, Artificial Sequence
  source: /note="Description of Artificial Sequence: Synthetic peptide"
  source: /note="N-term Amino group"
  MOD_RES (6)..(6): Nle
  MOD_RES (11)..(11): AzLys
  source: /note="C-term Amide"
YCQKWLWTCDKKRACCEGLECKLWCRKYI

SEQ ID NO: 321 - protein, 29 aa, Artificial Sequence
  source: /note="Description of Artificial Sequence: Synthetic peptide"
  source: /note="N-term Amino group"
  MOD_RES (6)..(6): Nle
  MOD_RES (14)..(14): AzLys
  source: /note="C-term Amide"
YCQKWLWTCDSKRKCCEGLECKLWCRKYI

SEQ ID NO: 322 - protein, 29 aa, Artificial Sequence
  source: /note="Description of Artificial Sequence: Synthetic peptide"
  source: /note="N-term Amino group"
  MOD_RES (6)..(6): Nle
  MOD_RES (17)..(17): AzLys
  source: /note="C-term Amide"
YCQKWLWTCDSKRACCKGLECKLWCRKYI

SEQ ID NO: 323 - protein, 30 aa, Artificial Sequence
  source: /note="Description of Artificial Sequence: Synthetic polypeptide"
  source: /note="N-term Amino group"
  MOD_RES (1)..(1): Aha
  MOD_RES (7)..(7): Nle
  source: /note="C-term Amide"
AYCQKWLWTCDSKRACCEGLECKLWCRKYI

SEQ ID NO: 324 - protein, 29 aa, Artificial Sequence
  source: /note="Description of Artificial Sequence: Synthetic peptide"
  source: /note="N-term Amino group"
  MOD_RES (1)..(1): Aha
  MOD_RES (6)..(6): Nle
  source: /note="C-term Amide"
ACQKWLWTCDSKRACCEGLECKLWCRKYI

SEQ ID NO: 325 - protein, 29 aa, Artificial Sequence
  source: /note="Description of Artificial Sequence: Synthetic peptide"
  source: /note="N-term Amino group"
  MOD_RES (6)..(6): Nle
  MOD_RES (11)..(11): Aha
  source: /note="C-term Amide"
YCQKWLWTCDAKRACCEGLECKLWCRKYI

SEQ ID NO: 326 - protein, 29 aa, Artificial Sequence
  source: /note="Description of Artificial Sequence: Synthetic peptide"
  source: /note="N-term Amino group"
  MOD_RES (6)..(6): Nle
  MOD_RES (14)..(14): Aha
  source: /note="C-term Amide"
YCQKWLWTCDSKRACCEGLECKLWCRKYI

SEQ ID NO: 327 - protein, 29 aa, Artificial Sequence
  source: /note="Description of Artificial Sequence: Synthetic peptide"
  source: /note="N-term Amino group"
  MOD_RES (6)..(6): Nle
  MOD_RES (17)..(17): Aha
  source: /note="C-term Amide"
YCQKWLWTCDSKRACCAGLECKLWCRKYI

SEQ ID NO: 328 - protein, 30 aa, Artificial Sequence
  source: /note="Description of Artificial Sequence: Synthetic polypeptide"
  source: /note="N-term Amino group"
  MOD_RES (1)..(1): Pra
  MOD_RES (7)..(7): Nle
  source: /note="C-term Amide"
GYCQKWLWTCDSKRACCEGLRCKLWCRKEI

SEQ ID NO: 329 - protein, 29 aa, Artificial Sequence
  source: /note="Description of Artificial Sequence: Synthetic peptide"
  source: /note="N-term Amino group"
  MOD_RES (1)..(1): Pra
  MOD_RES (6)..(6): Nle
  source: /note="C-term Amide"
GCQKWLWTCDSKRACCEGLRCKLWCRKEI

SEQ ID NO: 330 - protein, 29 aa, Artificial Sequence
  source: /note="Description of Artificial Sequence: Synthetic peptide"
  source: /note="N-term Amino group"
  MOD_RES (6)..(6): Nle
  MOD_RES (11)..(11): Pra
  source: /note="C-term Amide"
YCQKWLWTCDGKRACCEGLRCKLWCRKEI

SEQ ID NO: 331 - protein, 29 aa, Artificial Sequence
  source: /note="Description of Artificial Sequence: Synthetic peptide"
  source: /note="N-term Amino group"
  MOD_RES (6)..(6): Nle
  MOD_RES (14)..(14): Pra
  source: /note="C-term Amide"
YCQKWLWTCDSKRGCCEGLRCKLWCRKEI

SEQ ID NO: 332 - protein, 29 aa, Artificial Sequence
  source: /note="Description of Artificial Sequence: Synthetic peptide"
  source: /note="N-term Amino group"
  MOD_RES (6)..(6): Nle
  MOD_RES (17)..(17): Pra
  source: /note="C-term Amide"
YCQKWLWTCDSKRACCGGLRCKLWCRKEI

SEQ ID NO: 333 - protein, 30 aa, Artificial Sequence
  source: /note="Description of Artificial Sequence: Synthetic polypeptide"
  source: /note="N-term Amino group"
  MOD_RES (1)..(1): AzLys
  MOD_RES (7)..(7): Nle
  source: /note="C-term Amide"
KYCQKWLWTCDSKRACCEGLRCKLWCRKEI

SEQ ID NO: 334 - protein, 29 aa, Artificial Sequence
  source: /note="Description of Artificial Sequence: Synthetic peptide"
  source: /note="N-term Amino group"
  MOD_RES (1)..(1): AzLys
  MOD_RES (6)..(6): Nle
  source: /note="C-term Amide"
KCQKWLWTCDSKRACCEGLRCKLWCRKEI

SEQ ID NO: 335 - protein, 29 aa, Artificial Sequence
  source: /note="Description of Artificial Sequence: Synthetic peptide"
  source: /note="N-term Amino group"
  MOD_RES (6)..(6): Nle
  MOD_RES (11)..(11): AzLys
  source: /note="C-term Amide"
YCQKWLWTCDKKRACCEGLRCKLWCRKEI

SEQ ID NO: 336 - protein, 29 aa, Artificial Sequence
  source: /note="Description of Artificial Sequence: Synthetic peptide"
  source: /note="N-term Amino group"
  MOD_RES (6)..(6): Nle
  MOD_RES (14)..(14): AzLys
  source: /note="C-term Amide"
YCQKWLWTCDSKRKCCEGLRCKLWCRKEI

SEQ ID NO: 337 - protein, 29 aa, Artificial Sequence
  source: /note="Description of Artificial Sequence: Synthetic peptide"
  source: /note="N-term Amino group"
  MOD_RES (6)..(6): Nle
  MOD_RES (17)..(17): AzLys
  source: /note="C-term Amide"
YCQKWLWTCDSKRACCKGLRCKLWCRKEI

SEQ ID NO: 338 - protein, 30 aa, Artificial Sequence
  source: /note="Description of Artificial Sequence: Synthetic polypeptide"
  source: /note="N-term Amino group"
  MOD_RES (1)..(1): Aha
  MOD_RES (7)..(7): Nle
  source: /note="C-term Amide"
AYCQKWLWTCDSKRACCEGLRCKLWCRKEI

SEQ ID NO: 339 - protein, 29 aa, Artificial Sequence
  source: /note="Description of Artificial Sequence: Synthetic peptide"
  source: /note="N-term Amino group"
  MOD_RES (1)..(1): Aha
  MOD_RES (6)..(6): Nle
  source: /note="C-term Amide"
ACQKWLWTCDSKRACCEGLRCKLWCRKEI

SEQ ID NO: 340 - protein, 29 aa, Artificial Sequence
  source: /note="Description of Artificial Sequence: Synthetic peptide"
  source: /note="N-term Amino group"
  MOD_RES (6)..(6): Nle
  MOD_RES (11)..(11): Aha
  source: /note="C-term Amide"
YCQKWLWTCDAKRACCEGLRCKLWCRKEI

SEQ ID NO: 341 - protein, 29 aa, Artificial Sequence
  source: /note="Description of Artificial Sequence: Synthetic peptide"
  source: /note="N-term Amino group"
  MOD_RES (6)..(6): Nle
  MOD_RES (14)..(14): Aha
  source: /note="C-term Amide"
YCQKWLWTCDSKRACCEGLRCKLWCRKEI

SEQ ID NO: 342 - protein, 29 aa, Artificial Sequence
  source: /note="Description of Artificial Sequence: Synthetic peptide"
  source: /note="N-term Amino group"
  MOD_RES (6)..(6): Nle
  MOD_RES (17)..(17): Aha
  source: /note="C-term Amide"
YCQKWLWTCDSKRACCAGLRCKLWCRKEI

SEQ ID NO: 343 - protein, 29 aa, Artificial Sequence
  source: /note="Description of Artificial Sequence: Synthetic peptide"
  source: /note="N-term Amino group"
  MOD_RES (1)..(1): Pra
  MOD_RES (6)..(6): Nle
  source: /note="C-term Amide"
GCQKWLWTCDSKRACCEGLECKLWCRKII

SEQ ID NO: 344 - protein, 29 aa, Artificial Sequence
  source: /note="Description of Artificial Sequence: Synthetic peptide"
  source: /note="N-term Amino group"
  MOD_RES (6)..(6): Nle
  MOD_RES (11)..(11): Pra
  source: /note="C-term Amide"
YCQKWLWTCDGKRACCEGLECKLWCRKII

SEQ ID NO: 345 - protein, 29 aa, Artificial Sequence
  source: /note="Description of Artificial Sequence: Synthetic peptide"
  source: /note="N-term Amino group"
  MOD_RES (6)..(6): Nle
  MOD_RES (14)..(14): Pra
  source: /note="C-term Amide"
YCQKWLWTCDSKRGCCEGLECKLWCRKII

SEQ ID NO: 346 - protein, 29 aa, Artificial Sequence
  source: /note="Description of Artificial Sequence: Synthetic peptide"
  source: /note="N-term Amino group"
  MOD_RES (6)..(6): Nle
  MOD_RES (17)..(17): Pra
  source: /note="C-term Amide"
YCQKWLWTCDSKRACCGGLECKLWCRKII

SEQ ID NO: 347 - protein, 30 aa, Artificial Sequence
  source: /note="Description of Artificial Sequence: Synthetic polypeptide"
  source: /note="N-term Amino group"
  MOD_RES (1)..(1): AzLys
  MOD_RES (7)..(7): Nle
  source: /note="C-term Amide"
KYCQKWLWTCDSKRACCEGLECKLWCRKII

SEQ ID NO: 348 - protein, 29 aa, Artificial Sequence
  source: /note="Description of Artificial Sequence: Synthetic peptide"
  source: /note="N-term Amino group"
  MOD_RES (1)..(1): AzLys
  MOD_RES (6)..(6): Nle
  source: /note="C-term Amide"
KCQKWLWTCDSKRACCEGLECKLWCRKII

SEQ ID NO: 349 - protein, 29 aa, Artificial Sequence
  source: /note="Description of Artificial Sequence: Synthetic peptide"
  source: /note="N-term Amino group"
  MOD_RES (6)..(6): Nle
  MOD_RES (11)..(11): AzLys
  source: /note="C-term Amide"
YCQKWLWTCDKKRACCEGLECKLWCRKII

SEQ ID NO: 350 - protein, 29 aa, Artificial Sequence
  source: /note="Description of Artificial Sequence: Synthetic peptide"
  source: /note="N-term Amino group"
  MOD_RES (6)..(6): Nle
  MOD_RES (14)..(14): AzLys
  source: /note="C-term Amide"
YCQKWLWTCDSKRKCCEGLECKLWCRKII

SEQ ID NO: 351 - protein, 29 aa, Artificial Sequence
  source: /note="Description of Artificial Sequence: Synthetic peptide"
  source: /note="N-term Amino group"
  MOD_RES (6)..(6): Nle
  MOD_RES (17)..(17): AzLys
  source: /note="C-term Amide"
YCQKWLWTCDSKRACCKGLECKLWCRKII

SEQ ID NO: 352 - protein, 30 aa, Artificial Sequence
  source: /note="Description of Artificial Sequence: Synthetic polypeptide"
  source: /note="N-term Amino group"
  MOD_RES (1)..(1): Aha
  MOD_RES (7)..(7): Nle
  source: /note="C-term Amide"
AYCQKWLWTCDSKRACCEGLECKLWCRKII

SEQ ID NO: 353 - protein, 29 aa, Artificial Sequence
  source: /note="Description of Artificial Sequence: Synthetic peptide"
  source: /note="N-term Amino group"
  MOD_RES (1)..(1): Aha
  MOD_RES (6)..(6): Nle
  source: /note="C-term Amide"
ACQKWLWTCDSKRACCEGLECKLWCRKII

SEQ ID NO: 354 - protein, 29 aa, Artificial Sequence
  source: /note="Description of Artificial Sequence: Synthetic peptide"
  source: /note="N-term Amino group"
  MOD_RES (6)..(6): Nle
  MOD_RES (11)..(11): Aha
  source: /note="C-term Amide"
YCQKWLWTCDAKRACCEGLECKLWCRKII

SEQ ID NO: 355 - protein, 29 aa, Artificial Sequence
  source: /note="Description of Artificial Sequence: Synthetic peptide"
  source: /note="N-term Amino group"
  MOD_RES (6)..(6): Nle
  MOD_RES (14)..(14): Aha
  source: /note="C-term Amide"
YCQKWLWTCDSKRACCEGLECKLWCRKII

SEQ ID NO: 356 - protein, 29 aa, Artificial Sequence
  source: /note="Description of Artificial Sequence: Synthetic peptide"
  source: /note="N-term Amino group"
  MOD_RES (6)..(6): Nle
  MOD_RES (17)..(17): Aha
  source: /note="C-term Amide"
YCQKWLWTCDSKRACCAGLECKLWCRKII

SEQ ID NO: 357 - protein, 30 aa, Artificial Sequence; identical to SEQ ID NO: 247
  source: /note="Description of Artificial Sequence: Synthetic polypeptide"
  source: /note="N-term Amino group"
  MOD_RES (7)..(7): Nle
  source: /note="C-term Amide"

SEQ ID NO: 358 - protein, 30 aa, Artificial Sequence
  source: /note="Description of Artificial Sequence: Synthetic polypeptide"
  source: /note="N-term Amino group"
  MOD_RES (7)..(7): Nle
  source: /note="C-term Amide"
FYCQKWLWTCDSKRACCEGLRCKLWCRKII

SEQ ID NO: 359 - protein, 30 aa, Artificial Sequence
  source: /note="Description of Artificial Sequence: Synthetic polypeptide"
  source: /note="N-term Amino group"
  MOD_RES (7)..(7): Nle
  source: /note="C-term Amide"
GYCQKWLWTCDSKRACCEGLRCKLWCRKII

SEQ ID NO: 360 - protein, 30 aa, Artificial Sequence
  source: /note="Description of Artificial Sequence: Synthetic polypeptide"
  source: /note="N-term Amino group"
  MOD_RES (7)..(7): Nle
  source: /note="C-term Amide"
IYCQKWLWTCDSKRACCEGLRCKLWCRKII

SEQ ID NO: 361 - protein, 30 aa, Artificial Sequence
  source: /note="Description of Artificial Sequence: Synthetic polypeptide"
  source: /note="N-term Amino group"
  MOD_RES (7)..(7): Nle
  source: /note="C-term Amide"
LYCQKWLWTCDSKRACCEGLRCKLWCRKII

SEQ ID NO: 362 - protein, 30 aa, Artificial Sequence
  source: /note="Description of Artificial Sequence: Synthetic polypeptide"
  source: /note="N-term Amino group"
  MOD_RES (7)..(7): Nle
  source: /note="C-term Amide"
PYCQKWLWTCDSKRACCEGLRCKLWCRKII

SEQ ID NO: 363 - protein, 30 aa, Artificial Sequence
  source: /note="Description of Artificial Sequence: Synthetic polypeptide"
  source: /note="N-term Amino group"
  MOD_RES (7)..(7): Nle
  source: /note="C-term Amide"
VYCQKWLWTCDSKRACCEGLRCKLWCRKII

SEQ ID NO: 364 - protein, 30 aa, Artificial Sequence
  source: /note="Description of Artificial Sequence: Synthetic polypeptide"
  source: /note="N-term Amino group"
  MOD_RES (7)..(7): Nle
  source: /note="C-term Amide"
WYCQKWLWTCDSKRACCEGLRCKLWCRKII

SEQ ID NO: 365 - protein, 30 aa, Artificial Sequence
  source: /note="Description of Artificial Sequence: Synthetic polypeptide"
  source: /note="N-term Amino group"
  MOD_RES (7)..(7): Nle
  source: /note="C-term Amide"
YYCQKWLWTCDSKRACCEGLRCKLWCRKII

SEQ ID NO: 366 - protein, 30 aa, Artificial Sequence; identical to SEQ ID NO: 247
  source: /note="Description of Artificial Sequence: Synthetic polypeptide"
  source: /note="N-term Amino group"
  MOD_RES (1)..(1): CyA
  MOD_RES (7)..(7): Nle
  source: /note="C-term Amide"

SEQ ID NO: 367 - protein, 30 aa, Artificial Sequence; identical to SEQ ID NO: 359
  source: /note="Description of Artificial Sequence: Synthetic polypeptide"
  source: /note="N-term Amino group"
  MOD_RES (1)..(1): AllylG
  MOD_RES (7)..(7): Nle
  source: /note="C-term Amide"

SEQ ID NO: 368 - protein, 30 aa, Artificial Sequence
  source: /note="Description of Artificial Sequence: Synthetic polypeptide"
  source: /note="N-term Amino group"
  MOD_RES (1)..(1): Abu
  MOD_RES (7)..(7): Nle
  source: /note="C-term Amide"
XYCQKWLWTCDSKRACCEGLRCKLWCRKII

SEQ ID NO: 369 - protein, 30 aa, Artificial Sequence; identical to SEQ ID NO: 363
  source: /note="Description of Artificial Sequence: Synthetic polypeptide"
  source: /note="N-term Amino group"
  MOD_RES (1)..(1): Nva
  MOD_RES (7)..(7): Nle
  source: /note="C-term Amide"

SEQ ID NO: 370 - protein, 30 aa, Artificial Sequence; identical to SEQ ID NO: 361
  source: /note="Description of Artificial Sequence: Synthetic polypeptide"
  source: /note="N-term Amino group"
  MOD_RES (1)..(1): Nle
  MOD_RES (7)..(7): Nle
  source: /note="C-term Amide"

SEQ ID NO: 371 - protein, 30 aa, Artificial Sequence; identical to SEQ ID NO: 359
  source: /note="Description of Artificial Sequence: Synthetic polypeptide"
  source: /note="N-term Amino group"
  MOD_RES (1)..(1): OctylG
  MOD_RES (7)..(7): Nle
  source: /note="C-term Amide"

SEQ ID NO: 372 - protein, 30 aa, Artificial Sequence; identical to SEQ ID NO: 247
  source: /note="Description of Artificial Sequence: Synthetic polypeptide"
  source: /note="N-term Amino group"
  MOD_RES (1)..(1): D-residue
  MOD_RES (7)..(7): Nle
  source: /note="C-term Amide"

SEQ ID NO: 373 - protein, 30 aa, Artificial Sequence; identical to SEQ ID NO: 361
  source: /note="Description of Artificial Sequence: Synthetic polypeptide"
  source: /note="N-term Amino group"
  MOD_RES (1)..(1): D-residue
  MOD_RES (7)..(7): Nle
  source: /note="C-term Amide"

SEQ ID NO: 374 - protein, 30 aa, Artificial Sequence; identical to SEQ ID NO: 358
  source: /note="Description of Artificial Sequence: Synthetic polypeptide"
  source: /note="N-term Amino group"
  MOD_RES (1)..(1): D-residue
  MOD_RES (7)..(7): Nle
  source: /note="C-term Amide"

SEQ ID NO: 375 - protein, 30 aa, Artificial Sequence; identical to SEQ ID NO: 368
  source: /note="Description of Artificial Sequence: Synthetic polypeptide"
  source: /note="N-term Amino group"
  MOD_RES (1)..(1): Sar
  MOD_RES (7)..(7): Nle
  source: /note="C-term Amide"

SEQ ID NO: 376 - protein, 30 aa, Artificial Sequence; identical to SEQ ID NO: 247
  source: /note="Description of Artificial Sequence: Synthetic polypeptide"
  source: /note="N-term Amino group"
  MOD_RES (1)..(1): bAla
  MOD_RES (7)..(7): Nle
  source: /note="C-term Amide"

SEQ ID NO: 377 - protein, 30 aa, Artificial Sequence; identical to SEQ ID NO: 361
  source: /note="Description of Artificial Sequence: Synthetic polypeptide"
  source: /note="N-term Amino group"
  MOD_RES (1)..(1): hLeu
  MOD_RES (7)..(7): Nle
  source: /note="C-term Amide"

SEQ ID NO: 378 - protein, 30 aa, Artificial Sequence; identical to SEQ ID NO: 358
  source: /note="Description of Artificial Sequence: Synthetic polypeptide"
  source: /note="N-term Amino group"
  MOD_RES (1)..(1): 4-Cl-Phe
  MOD_RES (7)..(7): Nle
  source: /note="C-term Amide"

SEQ ID NO: 379 - protein, 30 aa, Artificial Sequence; identical to SEQ ID NO: 358
  source: /note="Description of Artificial Sequence: Synthetic polypeptide"
  source: /note="N-term Amino group"
  MOD_RES (1)..(1): hPhe
  MOD_RES (7)..(7): Nle
  source: /note="C-term Amide"

SEQ ID NO: 380 - protein, 30 aa, Artificial Sequence
  source: /note="Description of Artificial Sequence: Synthetic polypeptide"
  source: /note="N-term Amino group"
  MOD_RES (1)..(1): CyA
  MOD_RES (7)..(7): Nle
  MOD_RES (15)..(15): KPPG3
  source: /note="C-term Amide"
AYCQKWLWTCDSKRKCCEGLRCKLWCRKII

SEQ ID NO: 381 - protein, 30 aa, Artificial Sequence
  source: /note="Description of Artificial Sequence: Synthetic polypeptide"
  source: /note="N-term Amino group"
  MOD_RES (1)..(1): AllylG
  MOD_RES (7)..(7): Nle
  MOD_RES (15)..(15): KPPG3
  source: /note="C-term Amide"
GYCQKWLWTCDSKRKCCEGLRCKLWCRKII

SEQ ID NO: 382 - protein, 30 aa, Artificial Sequence
  source: /note="Description of Artificial Sequence: Synthetic polypeptide"
  source: /note="N-term Amino group"
  MOD_RES (1)..(1): Abu
  MOD_RES (7)..(7): Nle
  MOD_RES (15)..(15): KPPG3
  source: /note="C-term Amide"
XYCQKWLWTCDSKRKCCEGLRCKLWCRKII

SEQ ID NO: 383 - protein, 30 aa, Artificial Sequence
  source: /note="Description of Artificial Sequence: Synthetic polypeptide"
  source: /note="N-term Amino group"
  MOD_RES (1)..(1): Nva
  MOD_RES (7)..(7): Nle
  MOD_RES (15)..(15): KPPG3
  source: /note="C-term Amide"
VYCQKWLWTCDSKRKCCEGLRCKLWCRKII

SEQ ID NO: 384 - protein, 30 aa, Artificial Sequence; identical to SEQ ID NO: 381
  source: /note="Description of Artificial Sequence: Synthetic polypeptide"
  source: /note="N-term Amino group"
  MOD_RES (1)..(1): Pra
  MOD_RES (7)..(7): Nle
  MOD_RES (15)..(15): KPPG3
  source: /note="C-term Amide"

SEQ ID NO: 385 - protein, 30 aa, Artificial Sequence
  source: /note="Description of Artificial Sequence: Synthetic polypeptide"
  source: /note="N-term Amino group"
  MOD_RES (1)..(1): CyA
  MOD_RES (7)..(7): Nle
  MOD_RES (18)..(18): KPPG3
  source: /note="C-term Amide"
AYCQKWLWTCDSKRACCKGLRCKLWCRKII

SEQ ID NO: 386 - protein, 30 aa, Artificial Sequence
  source: /note="Description of Artificial Sequence: Synthetic polypeptide"
  source: /note="N-term Amino group"
  MOD_RES (1)..(1): Pra
  MOD_RES (7)..(7): Nle
  MOD_RES (18)..(18): KPPG3
  source: /note="C-term Amide"
GYCQKWLWTCDSKRACCKGLRCKLWCRKII

SEQ ID NO: 387 - protein, 30 aa, Artificial Sequence
  source: /note="Description of Artificial Sequence: Synthetic polypeptide"
  source: /note="N-term Amino group"
  MOD_RES (1)..(1): Pra
  MOD_RES (7)..(7): Nle
  MOD_RES (18)..(18): Pra
  source: /note="C-term Amide"
GYCQKWLWTCDSKRACCGGLRCKLWCRKII

SEQ ID NO: 388 - protein, 30 aa, Artificial Sequence
  source: /note="Description of Artificial Sequence: Synthetic polypeptide"
  source: /note="N-term Amino group"
  MOD_RES (1)..(1): CyA
  MOD_RES (7)..(7): Nle
  MOD_RES (18)..(18): Pra
  source: /note="C-term Amide"
AYCQKWLWTCDSKRACCGGLRCKLWCRKII

SEQ ID NO: 389 - protein, 30 aa, Artificial Sequence
  source: /note="Description of Artificial Sequence: Synthetic polypeptide"
  source: /note="N-term Amino group"
  MOD_RES (1)..(1): CyA
  MOD_RES (7)..(7): Nle
  MOD_RES (12)..(12): Pra
  source: /note="C-term Amide"
AYCQKWLWTCDGKRACCEGLRCKLWCRKII

SEQ ID NO: 390 - protein, 30 aa, Artificial Sequence
  source: /note="Description of Artificial Sequence: Synthetic polypeptide"
  source: /note="N-term Amino group"
  MOD_RES (1)..(1): Pra
  MOD_RES (7)..(7): Nle
  MOD_RES (12)..(12): Pra
  source: /note="C-term Amide"
GYCQKWLWTCDGKRACCEGLRCKLWCRKII

SEQ ID NO: 391 - protein, 30 aa, Artificial Sequence
  source: /note="Description of Artificial Sequence: Synthetic polypeptide"
  source: /note="N-term Amino group"
  MOD_RES (1)..(1): CyA
  MOD_RES (2)..(2): Pra
  MOD_RES (7)..(7): Nle
  source: /note="C-term Amide"
AGCQKWLWTCDSKRACCEGLRCKLWCRKII

SEQ ID NO: 392 - protein, 30 aa, Artificial Sequence
  source: /note="Description of Artificial Sequence: Synthetic polypeptide"
  source: /note="N-term Amino group"
  MOD_RES (1)..(1): CyA
  MOD_RES (7)..(7): Nle
  MOD_RES (15)..(15): Lys(Pra)
  source: /note="C-term Amide"
AYCQKWLWTCDSKRKCCEGLRCKLWCRKEI

SEQ ID NO: 393 - protein, 30 aa, Artificial Sequence
  source: /note="Description of Artificial Sequence: Synthetic polypeptide"
  source: /note="N-term Amino group"
  MOD_RES (1)..(1): CyA
  MOD_RES (7)..(7): Nle
  MOD_RES (15)..(15): Lys(Pra)
  source: /note="C-term Amide"
AYCQKWLWTCDSKRKCCEGLECKLWCRKII

SEQ ID NO: 394 - protein, 30 aa, Artificial Sequence
  source: /note="Description of Artificial Sequence: Synthetic polypeptide"
  source: /note="N-term Amino group"
  MOD_RES (1)..(1): CyA
  MOD_RES (7)..(7): Nle
  MOD_RES (15)..(15): Lys(Pra)
  source: /note="C-term Amide"
AYCQKWLWTCDSKRKCCEGLECKLWCRKYI

SEQ ID NO: 395 - protein, 30 aa, Artificial Sequence
  source: /note="Description of Artificial Sequence: Synthetic polypeptide"
  source: /note="N-term Amino group"
  MOD_RES (1)..(1): CyA
  MOD_RES (7)..(7): Nle
  MOD_RES (18)..(18): Pra
  source: /note="C-term Amide"
AYCQKWLWTCDSKRACCGGLRCKLWCRKEI

SEQ ID NO: 396 - protein, 30 aa, Artificial Sequence
  source: /note="Description of Artificial Sequence: Synthetic polypeptide"
  source: /note="N-term Amino group"
  MOD_RES (1)..(1): CyA
  MOD_RES (7)..(7): Nle
  MOD_RES (18)..(18): Pra
  source: /note="C-term Amide"
AYCQKWLWTCDSKRACCGGLECKLWCRKII

SEQ ID NO: 397 - protein, 30 aa, Artificial Sequence
  source: /note="Description of Artificial Sequence: Synthetic polypeptide"
  source: /note="N-term Amino group"
  MOD_RES (1)..(1): CyA
  MOD_RES (7)..(7): Nle
  MOD_RES (18)..(18): Pra
  source: /note="C-term Amide"
AYCQKWLWTCDSKRACCGGLECKLWCRKYI

SEQ ID NO: 398 - protein, 30 aa, Artificial Sequence; identical to SEQ ID NO: 380
  source: /note="Description of Artificial Sequence: Synthetic polypeptide"
  source: /note="N-term Amino group"
  MOD_RES (1)..(1): CyA
  MOD_RES (7)..(7): Nle
  MOD_RES (15)..(15): Lys(Pra)
  source: /note="C-term Amide"

SEQ ID NO: 399 - protein, 30 aa, Artificial Sequence; identical to SEQ ID NO: 381
  source: /note="Description of Artificial Sequence: Synthetic polypeptide"
  source: /note="N-term Amino group"
  MOD_RES (1)..(1): AllylG
  MOD_RES (7)..(7): Nle
  MOD_RES (15)..(15): Lys(Pra)
  source: /note="C-term Amide"

SEQ ID NO: 400 - protein, 30 aa, Artificial Sequence; identical to SEQ ID NO: 382
  source: /note="Description of Artificial Sequence: Synthetic polypeptide"
  source: /note="N-term Amino group"
  MOD_RES (1)..(1): Abu
  MOD_RES (7)..(7): Nle
  MOD_RES (15)..(15): Lys(Pra)
  source: /note="C-term Amide"

SEQ ID NO: 401 - protein, 30 aa, Artificial Sequence; identical to SEQ ID NO: 383
  source: /note="Description of Artificial Sequence: Synthetic polypeptide"
  source: /note="N-term Amino group"
  MOD_RES (1)..(1): Nva
  MOD_RES (7)..(7): Nle
  MOD_RES (15)..(15): Lys(Pra)
  source: /note="C-term Amide"

SEQ ID NO: 402 - protein, 30 aa, Artificial Sequence; identical to SEQ ID NO: 387
  source: /note="Description of Artificial Sequence: Synthetic polypeptide"
  source: /note="N-term Amino group"
  MOD_RES (1)..(1): AllylG
  MOD_RES (7)..(7): Nle
  MOD_RES (18)..(18): Pra
  source: /note="C-term Amide"

SEQ ID NO: 403 - protein, 30 aa, Artificial Sequence
  source: /note="Description of Artificial Sequence: Synthetic polypeptide"
  source: /note="N-term Amino group"
  MOD_RES (1)..(1): Nva
  MOD_RES (7)..(7): Nle
  MOD_RES (18)..(18): Pra
  source: /note="C-term Amide"
VYCQKWLWTCDSKRACCGGLRCKLWCRKII

SEQ ID NO: 404 - protein, 30 aa, Artificial Sequence; identical to SEQ ID NO: 383
  source: /note="Description of Artificial Sequence: Synthetic polypeptide"
  source: /note="N-term Amino group"
  MOD_RES (1)..(1): Nva
  MOD_RES (7)..(7): Nle
  MOD_RES (15)..(15): Lys(Pra)
  source: /note="C-term Amide"

SEQ ID NO: 405 - protein, 30 aa, Artificial Sequence; identical to SEQ ID NO: 383
  source: /note="Description of Artificial Sequence: Synthetic polypeptide"
  source: /note="N-term Amino group"
  MOD_RES (1)..(1): Nva
  MOD_RES (7)..(7): Nle
  MOD_RES (15)..(15): KPPG3
  source: /note="C-term Amide"

SEQ ID NO: 406 - protein, 29 aa, Artificial Sequence
  source: /note="Description of Artificial Sequence: Synthetic peptide"
  source: /note="N-term Amino group"
  MOD_RES (6)..(6): Nle
  MOD_RES (17)..(17): Atz(PEG10)
  source: /note="C-term Amide"
YCQKWLWTCDSKRACCAGLRCKLWCRKEI

SEQ ID NO: 407 - protein, 29 aa, Artificial Sequence
  source: /note="Description of Artificial Sequence: Synthetic peptide"
  source: /note="N-term Amino group"
  MOD_RES (1)..(1): Atz(PEG10)
  MOD_RES (6)..(6): Nle
  source: /note="C-term Amide"
ACQKWLWTCDSKRACCEGLECKLWCRKII

SEQ ID NO: 408 - protein, 29 aa, Artificial Sequence
  source: /note="Description of Artificial Sequence: Synthetic peptide"
  source: /note="N-term Amino group"
  MOD_RES (6)..(6): Nle
  MOD_RES (11)..(11): Atz(PEG10)
  source: /note="C-term Amide"
YCQKWLWTCDAKRACCEGLECKLWCRKII

SEQ ID NO: 409 - protein, 29 aa, Artificial Sequence
  source: /note="Description of Artificial Sequence: Synthetic peptide"
  source: /note="N-term Amino group"
  MOD_RES (6)..(6): Nle
  MOD_RES (17)..(17): Atz(PEG10)
  source: /note="C-term Amide"
YCQKWLWTCDSKRACCAGLECKLWCRKII

SEQ ID NO: 410 - protein, 30 aa, Artificial Sequence; identical to SEQ ID NO: 380
  source: /note="Description of Artificial Sequence: Synthetic polypeptide"
  source: /note="N-term Amino group"
  MOD_RES (1)..(1): CyA
  MOD_RES (7)..(7): Nle
  MOD_RES (15)..(15): KAP3P10
  source: /note="C-term Amide"

SEQ ID NO: 411 - protein, 30 aa, Artificial Sequence
  source: /note="Description of Artificial Sequence: Synthetic polypeptide"
  source: /note="N-term Amino group"
  MOD_RES (1)..(1): Nva
  MOD_RES (7)..(7): Nle
  MOD_RES (15)..(15): Lys(Pra)
  source: /note="C-term Amide"
VYCQKWLWTCDSKRKCCEGLRCKLWCRKEI

SEQ ID NO: 412 - protein, 30 aa, Artificial Sequence; identical to SEQ ID NO: 411
  source: /note="Description of Artificial Sequence: Synthetic polypeptide"
  source: /note="N-term Amino group"
  MOD_RES (1)..(1): Nva
  MOD_RES (15)..(15): Lys(Pra)
  source: /note="C-term Amide"

SEQ ID NO: 413 - protein, 30 aa, Artificial Sequence
  source: /note="Description of Artificial Sequence: Synthetic polypeptide"
  source: /note="N-term Amino group"
  MOD_RES (1)..(1): Nva
  MOD_RES (7)..(7): Nle
  MOD_RES (15)..(15): Lys(Pra)
  source: /note="C-term Amide"
VYCQKWLWTCDSKRKCCEGLECKLWCRKYI

SEQ ID NO: 414 - protein, 30 aa, Artificial Sequence; identical to SEQ ID NO: 413
  source: /note="Description of Artificial Sequence: Synthetic polypeptide"
  source: /note="N-term Amino group"
  MOD_RES (1)..(1): Nva
  MOD_RES (15)..(15): Lys(Pra)
  source: /note="C-term Amide"

SEQ ID NO: 415 - protein, 30 aa, Artificial Sequence; identical to SEQ ID NO: 411
  source: /note="Description of Artificial Sequence: Synthetic polypeptide"
  source: /note="N-term Amino group"
  MOD_RES (1)..(1): Nva
  MOD_RES (7)..(7): Nle
  MOD_RES (15)..(15): KPPG3
  source: /note="C-term Amide"

SEQ ID NO: 416 - protein, 30 aa, Artificial Sequence; identical to SEQ ID NO: 411
  source: /note="Description of Artificial Sequence: Synthetic polypeptide"
  source: /note="N-term Amino group"
  MOD_RES (1)..(1): Nva
  MOD_RES (15)..(15): KPPG3
  source: /note="C-term Amide"

SEQ ID NO: 417 - protein, 30 aa, Artificial Sequence; identical to SEQ ID NO: 413
  source: /note="Description of Artificial Sequence: Synthetic polypeptide"
  source: /note="N-term Amino group"
  MOD_RES (1)..(1): Nva
  MOD_RES (7)..(7): Nle
  MOD_RES (15)..(15): KPPG3
  source: /note="C-term Amide"

SEQ ID NO: 418 - protein, 30 aa, Artificial Sequence; identical to SEQ ID NO: 413
  source: /note="Description of Artificial Sequence: Synthetic polypeptide"
  source: /note="N-term Amino group"
  MOD_RES (1)..(1): Nva
  MOD_RES (15)..(15): KPPG3
  source: /note="C-term Amide"

SEQ ID NO: 419 - protein, 30 aa, Artificial Sequence
  source: /note="Description of Artificial Sequence: Synthetic polypeptide"
  source: /note="N-term Amino group"
  MOD_RES (1)..(1): Nva
  MOD_RES (7)..(7): Nle
  MOD_RES (15)..(15): Lys(Pra)
  source: /note="C-term Amide"
VYCQKWLWTCDSKRKCCEGLECKLWCRKIW

SEQ ID NO: 420 - protein, 30 aa, Artificial Sequence; identical to SEQ ID NO: 419
  source: /note="Description of Artificial Sequence: Synthetic polypeptide"
  source: /note="N-term Amino group"
  MOD_RES (1)..(1): Nva
  MOD_RES (15)..(15): Lys(Pra)
  source: /note="C-term Amide"

SEQ ID NO: 421 - protein, 30 aa, Artificial Sequence; identical to SEQ ID NO: 419
  source: /note="Description of Artificial Sequence: Synthetic polypeptide"
  source: /note="N-term Amino group"
  MOD_RES (1)..(1): Nva
  MOD_RES (7)..(7): Nle
  MOD_RES (15)..(15): KPPG3
  source: /note="C-term Amide"

SEQ ID NO: 422 - protein, 30 aa, Artificial Sequence; identical to SEQ ID NO: 419
  source: /note="Description of Artificial Sequence: Synthetic polypeptide"
  source: /note="N-term Amino group"
  MOD_RES (1)..(1): Nva
  MOD_RES (15)..(15): KPPG3
  source: /note="C-term Amide"

SEQ ID NO: 423 - protein, 30 aa, Artificial Sequence; identical to SEQ ID NO: 383
  source: /note="Description of Artificial Sequence: Synthetic polypeptide"
  source: /note="N-term Amino group"
  MOD_RES (1)..(1): Nva
  MOD_RES (15)..(15): Lys(Pra)
  source: /note="C-term Amide"

SEQ ID NO: 424 - protein, 30 aa, Artificial Sequence; identical to SEQ ID NO: 383
  source: /note="Description of Artificial Sequence: Synthetic polypeptide"
  source: /note="N-term Amino group"
  MOD_RES (1)..(1): Nva
  MOD_RES (15)..(15): KPPG3
  source: /note="C-term Amide"

SEQ ID NO: 425 - protein, 30 aa, Artificial Sequence; identical to SEQ ID NO: 359
  source: /note="Description of Artificial Sequence: Synthetic polypeptide"
  source: /note="N-term Amino group"
  MOD_RES (1)..(1): Pra
  MOD_RES (7)..(7): Nle
  source: /note="C-term Amide"

SEQ ID NO: 426 - protein, 30 aa, Artificial Sequence; identical to SEQ ID NO: 299
  source: /note="Description of Artificial Sequence: Synthetic polypeptide"
  source: /note="N-term Amino group"
  MOD_RES (1)..(1): Pra
  MOD_RES (7)..(7): Nle
  source: /note="C-term Amide"

SEQ ID NO: 427 - protein, 30 aa, Artificial Sequence; identical to SEQ ID NO: 247
  source: /note="Description of Artificial Sequence: Synthetic polypeptide"
  source: /note="N-term Amino group"
  MOD_RES (1)..(1): Atz(PEG11-benzylthioacetamide)
  MOD_RES (7)..(7): Nle
  source: /note="C-term Amide"

SEQ ID NO: 428-429 - skipped (2 entries)

SEQ ID NO: 430 - protein, 29 aa, Chilobrachys jingzhao
YCQKWMWTCDSERKCCEGYVCELWCKYNM

SEQ ID NO: 431 - protein, 30 aa, Artificial Sequence; identical to SEQ ID NO: 383
  source: /note="Description of Artificial Sequence: Synthetic polypeptide"
  source: /note="N-term Amino group"
  MOD_RES (1)..(1): Nva
  MOD_RES (7)..(7): Nle
  MOD_RES (15)..(15): Lys(Pra)
  source: /note="C-term Amide"

SEQ ID NO: 432 - protein, 30 aa, Artificial Sequence; identical to SEQ ID NO: 383
  source: /note="Description of Artificial Sequence: Synthetic polypeptide"
  source: /note="N-term Amino group"
  MOD_RES (1)..(1): Nva
  MOD_RES (7)..(7): Nle
  MOD_RES (15)..(15): KPPG3
  source: /note="C-term Amide"

SEQ ID NO: 433 - protein, 30 aa, Artificial Sequence; identical to SEQ ID NO: 383
  source: /note="Description of Artificial Sequence: Synthetic polypeptide"
  source: /note="N-term Amino group"
  MOD_RES (1)..(1): Nva
  MOD_RES (7)..(7): Nle
  MOD_RES (15)..(15): KAtzNP10
  source: /note="C-term Amide"

SEQ ID NO: 434 - protein, 30 aa, Artificial Sequence; identical to SEQ ID NO: 383
  source: /note="Description of Artificial Sequence: Synthetic polypeptide"
  source: /note="N-term Amino group"
  MOD_RES (1)..(1): Nva
  MOD_RES (7)..(7): Nle
  MOD_RES (15)..(15): KAP4P10
  source: /note="C-term Amide"

SEQ ID NO: 435 - protein, 30 aa, Artificial Sequence; identical to SEQ ID NO: 411
  source: /note="Description of Artificial Sequence: Synthetic polypeptide"
  source: /note="N-term Amino group"
  MOD_RES (1)..(1): Nva
  MOD_RES (7)..(7): Nle
  MOD_RES (15)..(15): Lys(Pra)
  source: /note="C-term Amide"

SEQ ID NO: 436 - protein, 30 aa, Artificial Sequence; identical to SEQ ID NO: 413
  source: /note="Description of Artificial Sequence: Synthetic polypeptide"
  source: /note="N-term Amino group"
  MOD_RES (1)..(1): Nva
  MOD_RES (7)..(7): Nle
  MOD_RES (15)..(15): Lys(Pra)
  source: /note="C-term Amide"

SEQ ID NO: 437 - protein, 30 aa, Artificial Sequence; identical to SEQ ID NO: 419
  source: /note="Description of Artificial Sequence: Synthetic polypeptide"
  source: /note="N-term Amino group"
  MOD_RES (1)..(1): Nva
  MOD_RES (7)..(7): Nle
  MOD_RES (15)..(15): Lys(Pra)
  source: /note="C-term Amide"

SEQ ID NO: 438 - protein, 30 aa, Artificial Sequence; identical to SEQ ID NO: 383
  source: /note="Description of Artificial Sequence: Synthetic polypeptide"
  source: /note="N-term Amino group"
  MOD_RES (1)..(1): Nva
  MOD_RES (15)..(15): Lys(Pra)
  source: /note="C-term Amide"

SEQ ID NO: 439 - protein, 30 aa, Artificial Sequence; identical to SEQ ID NO: 411
  source: /note="Description of Artificial Sequence: Synthetic polypeptide"
  source: /note="N-term Amino group"
  MOD_RES (1)..(1): Nva
  MOD_RES (15)..(15): Lys(Pra)
  source: /note="C-term Amide"

SEQ ID NO: 440 - protein, 30 aa, Artificial Sequence; identical to SEQ ID NO: 413
  source: /note="Description of Artificial Sequence: Synthetic polypeptide"
  source: /note="N-term Amino group"
  MOD_RES (1)..(1): Nva
  MOD_RES (15)..(15): Lys(Pra)
  source: /note="C-term Amide"

SEQ ID NO: 441 - protein, 30 aa, Artificial Sequence; identical to SEQ ID NO: 419
  source: /note="Description of Artificial Sequence: Synthetic polypeptide"
  source: /note="N-term Amino group"
  MOD_RES (1)..(1): Nva
  MOD_RES (15)..(15): Lys(Pra)
  source: /note="C-term Amide"

SEQ ID NO: 442 - protein, 30 aa, Artificial Sequence; identical to SEQ ID NO: 411
  source: /note="Description of Artificial Sequence: Synthetic polypeptide"
  source: /note="N-term Amino group"
  MOD_RES (1)..(1): Nva
  MOD_RES (15)..(15): Lys(Pra-NPEG4)
  source: /note="C-term Amide"

SEQ ID NO: 443 - protein, 30 aa, Artificial Sequence
  source: /note="Description of Artificial Sequence: Synthetic polypeptide"
  source: /note="N-term Amino group"
  MOD_RES (1)..(1): CyA
  MOD_RES (7)..(7): Nle
  MOD_RES (18)..(18): Atz(NPEG10)
  source: /note="C-term Amide"
AYCQKWLWTCDSKRACCAGLRCKLWCRKEI

SEQ ID NO: 444 - protein, 30 aa, Artificial Sequence; identical to SEQ ID NO: 392
  source: /note="Description of Artificial Sequence: Synthetic polypeptide"
  source: /note="N-term Amino group"
  MOD_RES (1)..(1): CyA
  MOD_RES (7)..(7): Nle
  MOD_RES (15)..(15): Lys(Atz(NPEG10))
  source: /note="C-term Amide"

SEQ ID NO: 445 - protein, 30 aa, Artificial Sequence; identical to SEQ ID NO: 394
  source: /note="Description of Artificial Sequence: Synthetic polypeptide"
  source: /note="N-term Amino group"
  MOD_RES (1)..(1): CyA
  MOD_RES (7)..(7): Nle
  MOD_RES (15)..(15): Lys(Atz(NPEG10))
  source: /note="C-term Amide"

SEQ ID NO: 446 - protein, 30 aa, Artificial Sequence; identical to SEQ ID NO: 383
  source: /note="Description of Artificial Sequence: Synthetic polypeptide"
  source: /note="N-term Amino group"
  MOD_RES (1)..(1): Nva
  MOD_RES (15)..(15): Lys(Atz(NPEG10))
  source: /note="C-term Amide"

SEQ ID NO: 447 - protein, 30 aa, Artificial Sequence; identical to SEQ ID NO: 411
  source: /note="Description of Artificial Sequence: Synthetic polypeptide"
  source: /note="N-term Amino group"
  MOD_RES (1)..(1): Nva
  MOD_RES (15)..(15): Lys(Atz(NPEG10))
  source: /note="C-term Amide"

SEQ ID NO: 448 - protein, 30 aa, Artificial Sequence; identical to SEQ ID NO: 411
  source: /note="Description of Artificial Sequence: Synthetic polypeptide"
  source: /note="N-term Amino group"
  MOD_RES (1)..(1): Nva
  MOD_RES (7)..(7): Nle
  MOD_RES (15)..(15): Lys(Atz(NPEG10))
  source: /note="C-term Amide"

SEQ ID NO: 449 - protein, 30 aa, Artificial Sequence; identical to SEQ ID NO: 392
  source: /note="Description of Artificial Sequence: Synthetic polypeptide"
  source: /note="N-term Amino group"
  MOD_RES (1)..(1): CyA
  MOD_RES (15)..(15): Lys(Pra)
  source: /note="C-term Amide"

SEQ ID NO: 450 - protein, 30 aa, Artificial Sequence
  source: /note="Description of Artificial Sequence: Synthetic polypeptide"
  source: /note="N-term Amino group"
  MOD_RES (1)..(1): Pra
  MOD_RES (7)..(7): Nle
  source: /note="C-term Amide"
GYCQKWLWTCDSKRACCEGLRCKLWCRKEW

SEQ ID NO: 451 - protein, 30 aa, Artificial Sequence
  source: /note="Description of Artificial Sequence: Synthetic polypeptide"
  source: /note="N-term Amino group"
  MOD_RES (1)..(1): CyA
  MOD_RES (7)..(7): Nle
  MOD_RES (15)..(15): Lys(Pra)
  source: /note="C-term Amide"
AYCQKWLWTCDSKRKCCEGLRCKLWCRKEW

SEQ ID NO: 452 - protein, 30 aa, Artificial Sequence
  source: /note="Description of Artificial Sequence: Synthetic polypeptide"
  source: /note="N-term Amino group"
  MOD_RES (1)..(1): CyA
  MOD_RES (7)..(7): Nle
  MOD_RES (18)..(18): Pra
  source: /note="C-term Amide"
AYCQKWLWTCDSKRACCGGLRCKLWCRKEW

SEQ ID NO: 453 - protein, 30 aa, Artificial Sequence
  source: /note="Description of Artificial Sequence: Synthetic polypeptide"
  source: /note="N-term Amino group"
  MOD_RES (1)..(1): CyA
  MOD_RES (7)..(7): Nle
  MOD_RES (15)..(15): Lys(Pra)
  source: /note="C-term Amide"
AYCQKWLWTCDSKRKCCEGLRCKLWCRKIW

SEQ ID NO: 454 - protein, 30 aa, Artificial Sequence
  source: /note="Description of Artificial Sequence: Synthetic polypeptide"
  source: /note="N-term Amino group"
  MOD_RES (1)..(1): CyA
  MOD_RES (7)..(7): Nle
  MOD_RES (18)..(18): Pra
  source: /note="C-term Amide"
AYCQKWLWTCDSKRACCGGLRCKLWCRKIW

SEQ ID NO: 455 - protein, 30 aa, Artificial Sequence; identical to SEQ ID NO: 392
  source: /note="Description of Artificial Sequence: Synthetic polypeptide"
  source: /note="N-term Amino group"
  MOD_RES (1)..(1): CyA
  MOD_RES (7)..(7): Nle
  MOD_RES (15)..(15): Lys(NPeg11)
  source: /note="C-term Amide"

SEQ ID NO: 456 - protein, 30 aa, Artificial Sequence
  source: /note="Description of Artificial Sequence: Synthetic polypeptide"
  source: /note="N-term Amino group"
  MOD_RES (1)..(1): CyA
  MOD_RES (7)..(7): Nle
  MOD_RES (18)..(18): Lys(NPeg11)
  source: /note="C-term Amide"
AYCQKWLWTCDSKRACCKGLRCKLWCRKEI

SEQ ID NO: 457 - protein, 30 aa, Artificial Sequence; identical to SEQ ID NO: 333
  source: /note="Description of Artificial Sequence: Synthetic polypeptide"
  source: /note="N-term Amino group"
  MOD_RES (1)..(1): Lys(NPeg11)
  MOD_RES (7)..(7): Nle
  source: /note="C-term Amide"

SEQ ID NO: 458 - protein, 30 aa, Artificial Sequence; identical to SEQ ID NO: 451
  source: /note="Description of Artificial Sequence: Synthetic polypeptide"
  source: /note="N-term Amino group"
  MOD_RES (1)..(1): CyA
  MOD_RES (7)..(7): Nle
  MOD_RES (15)..(15): Lys(NPeg11)
  source: /note="C-term Amide"

SEQ ID NO: 459 - protein, 30 aa, Artificial Sequence
  source: /note="Description of Artificial Sequence: Synthetic polypeptide"
  source: /note="N-term Amino group"
  MOD_RES (1)..(1): CyA
  MOD_RES (7)..(7): Nle
  MOD_RES (18)..(18): Lys(NPeg11)
  source: /note="C-term Amide"
AYCQKWLWTCDSKRACCKGLRCKLWCRKEW

SEQ ID NO: 460 - protein, 30 aa, Artificial Sequence
  source: /note="Description of Artificial Sequence: Synthetic polypeptide"
  source: /note="N-term Amino group"
  MOD_RES (1)..(1): Lys(NPeg11)
  MOD_RES (7)..(7): Nle
  source: /note="C-term Amide"
KYCQKWLWTCDSKRACCEGLRCKLWCRKEW

SEQ ID NO: 461 - protein, 30 aa, Artificial Sequence
  source: /note="Description of Artificial Sequence: Synthetic polypeptide"
  source: /note="N-term Amino group"
  MOD_RES (7)..(7): Nle
  MOD_RES (15)..(15): Lys(NPeg11)
  source: /note="C-term Amide"
LYCQKWLWTCDSKRKCCEGLRCKLWCRKEI

SEQ ID NO: 462 - protein, 30 aa, Artificial Sequence
  source: /note="Description of Artificial Sequence: Synthetic polypeptide"
  source: /note="N-term Amino group"
  MOD_RES (7)..(7): Nle
  MOD_RES (18)..(18): Lys(NPeg11)
  source: /note="C-term Amide"
LYCQKWLWTCDSKRACCKGLRCKLWCRKEI

SEQ ID NO: 463 - protein, 30 aa, Artificial Sequence; identical to SEQ ID NO: 461
  source: /note="Description of Artificial Sequence: Synthetic polypeptide"
  source: /note="N-term Amino group"
  MOD_RES (1)..(1): D-residue
  MOD_RES (7)..(7): Nle
  MOD_RES (15)..(15): Lys(NPeg11)
  source: /note="C-term Amide"

SEQ ID NO: 464 - protein, 30 aa, Artificial Sequence; identical to SEQ ID NO: 462
  source: /note="Description of Artificial Sequence: Synthetic polypeptide"
  source: /note="N-term Amino group"
  MOD_RES (1)..(1): D-residue
  MOD_RES (7)..(7): Nle
  MOD_RES (18)..(18): Lys(NPeg11)
  source: /note="C-term Amide"

SEQ ID NO: 465 - protein, 30 aa, Artificial Sequence; identical to SEQ ID NO: 461
  source: /note="Description of Artificial Sequence: Synthetic polypeptide"
  source: /note="N-term Amino group"
  MOD_RES (1)..(1): NMeLeu
  MOD_RES (7)..(7): Nle
  MOD_RES (15)..(15): Lys(NPeg11)
  source: /note="C-term Amide"

SEQ ID NO: 466 - protein, 30 aa, Artificial Sequence; identical to SEQ ID NO: 462
  source: /note="Description of Artificial Sequence: Synthetic polypeptide"
  source: /note="N-term Amino group"
  MOD_RES (1)..(1): NMeLeu
  MOD_RES (7)..(7): Nle
  MOD_RES (18)..(18): Lys(NPeg11)
  source: /note="C-term Amide"

SEQ ID NO: 467 - protein, 30 aa, Artificial Sequence
  source: /note="Description of Artificial Sequence: Synthetic polypeptide"
  source: /note="N-term Amino group"
  MOD_RES (1)..(1): 1-Ach
  MOD_RES (7)..(7): Nle
  MOD_RES (15)..(15): Lys(NPeg11)
  source: /note="C-term Amide"
XYCQKWLWTCDSKRKCCEGLRCKLWCRKEI

SEQ ID NO: 468 - protein, 30 aa, Artificial Sequence
  source: /note="Description of Artificial Sequence: Synthetic polypeptide"
  source: /note="N-term Amino group"
  MOD_RES (1)..(1): 1-Ach
  MOD_RES (7)..(7): Nle
  MOD_RES (18)..(18): Lys(NPeg11)
  source: /note="C-term Amide"
XYCQKWLWTCDSKRACCKGLRCKLWCRKEI

SEQ ID NO: 469 - protein, 31 aa, Artificial Sequence
  source: /note="Description of Artificial Sequence: Synthetic polypeptide"
  source: /note="N-term Amino group"
  MOD_RES (2)..(2): Lys(NPeg11)
  MOD_RES (8)..(8): Nle
  source: /note="C-term Amide"
LKYCQKWLWTCDSKRACCEGLRCKLWCRKEI

SEQ ID NO: 470 - protein, 31 aa, Artificial Sequence
  source: /note="Description of Artificial Sequence: Synthetic polypeptide"
  source: /note="N-term Amino group"
  MOD_RES (2)..(2): Nva
  MOD_RES (8)..(8): Nle
  MOD_RES (16)..(16): Lys(NPeg11)
  source: /note="C-term Amide"
LVYCQKWLWTCDSKRKCCEGLRCKLWCRKEI

SEQ ID NO: 471 - protein, 31 aa, Artificial Sequence
  source: /note="Description of Artificial Sequence: Synthetic polypeptide"
  source: /note="N-term Amino group"
  MOD_RES (2)..(2): Nva
  MOD_RES (8)..(8): Nle
  MOD_RES (19)..(19): Lys(NPeg11)
  source: /note="C-term Amide"
LVYCQKWLWTCDSKRACCKGLRCKLWCRKEI

SEQ ID NO: 472 - protein, 31 aa, Artificial Sequence; identical to SEQ ID NO: 470
  source: /note="Description of Artificial Sequence: Synthetic polypeptide"
  source: /note="N-term Amino group"
  MOD_RES (1)..(1): D-residue
  MOD_RES (2)..(2): Nva
  MOD_RES (8)..(8): Nle
  MOD_RES (16)..(16): Lys(NPeg11)
  source: /note="C-term Amide"

SEQ ID NO: 473 - protein, 31 aa, Artificial Sequence; identical to SEQ ID NO: 471
  source: /note="Description of Artificial Sequence: Synthetic polypeptide"
  source: /note="N-term Amino group"
  MOD_RES (1)..(1): D-residue
  MOD_RES (2)..(2): Nva
  MOD_RES (8)..(8): Nle
  MOD_RES (19)..(19): Lys(NPeg11)
  source: /note="C-term Amide"

SEQ ID NO: 474 - protein, 31 aa, Artificial Sequence
  source: /note="Description of Artificial Sequence: Synthetic polypeptide"
  source: /note="N-term Amino group"
  MOD_RES (2)..(2): Nva
  MOD_RES (8)..(8): Nle
  MOD_RES (16)..(16): Lys(NPeg11)
  source: /note="C-term Amide"
FVYCQKWLWTCDSKRKCCEGLRCKLWCRKEI

SEQ ID NO: 475 - protein, 31 aa, Artificial Sequence
  source: /note="Description of Artificial Sequence: Synthetic polypeptide"
  source: /note="N-term Amino group"
  MOD_RES (2)..(2): Nva
  MOD_RES (8)..(8): Nle
  MOD_RES (19)..(19): Lys(NPeg11)
  source: /note="C-term Amide"
FVYCQKWLWTCDSKRACCKGLRCKLWCRKEI

SEQ ID NO: 476 - protein, 30 aa, Artificial Sequence
  source: /note="Description of Artificial Sequence: Synthetic polypeptide"
  source: /note="N-term Amino group"
  MOD_RES (1)..(1): CyA
  MOD_RES (7)..(7): Nle
  MOD_RES (21)..(21): Lys(NPeg11)
  source: /note="C-term Amide"
AYCQKWLWTCDSKRACCEGLKCKLWCRKIW

SEQ ID NO: 477 - protein, 20 aa, Artificial Sequence
  source: /note="Description of Artificial Sequence: Synthetic peptide"
GGGGSGGGGSGGGGSGGGGS

SEQ ID NO: 478 - protein, 246 aa, Artificial Sequence
  source: /note="Description of Artificial Sequence: Synthetic polypeptide"
MEWSWVFLFFLSVTTGVHSDKTHTCPPCPAPELLGGPSVFLFPPKPKDTLMISRTPEVTCVVVDVSHEDPEVKFNWYVDGVEVHNAKTKPREEQYNSTYRVVSVLTVLHQDWLNGKEYKCKVSNKALPAPIEKTISKAKGQPREPQVYTLPPSRDELTKNQVSLTCLVKGFYPSDIAVEWESNGQPENNYKTTPPVLDSDGSFFLYSKLTVDKSRWQQGNVFSCSVMHEALHNHYTQKSLSLSPGK

SEQ ID NO: 479 - protein, 6 aa, Artificial Sequence
  source: /note="Description of Artificial Sequence: Synthetic peptide"
  MOD_RES (1)..(2): Any amino acid
  MOD_RES (4)..(5): Any amino acid
XXNXXG

SEQ ID NO: 480 - protein, 4 aa, Artificial Sequence
  source: /note="Description of Artificial Sequence: Synthetic peptide"
GGGG

SEQ ID NO: 481 - protein, 5 aa, Artificial Sequence
  source: /note="Description of Artificial Sequence: Synthetic peptide"
GGGGG

SEQ ID NO: 482 - protein, 7 aa, Artificial Sequence
  source: /note="Description of Artificial Sequence: Synthetic peptide"
GGGGGGG

SEQ ID NO: 483 - protein, 15 aa, Artificial Sequence
  source: /note="Description of Artificial Sequence: Synthetic peptide"
GGGGSGGGGSGGGGS

SEQ ID NO: 484 - protein, 6 aa, Artificial Sequence
  source: /note="Description of Artificial Sequence: Synthetic peptide"
GGGGGK

SEQ ID NO: 485 - protein, 7 aa, Artificial Sequence
  source: /note="Description of Artificial Sequence: Synthetic peptide"
GGGGGKR

SEQ ID NO: 486 - protein, 8 aa, Artificial Sequence
  source: /note="Description of Artificial Sequence: Synthetic peptide"
GGGKGGGG

SEQ ID NO: 487 - protein, 8 aa, Artificial Sequence
  source: /note="Description of Artificial Sequence: Synthetic peptide"
GGGNGSGG

SEQ ID NO: 488 - protein, 8 aa, Artificial Sequence
  source: /note="Description of Artificial Sequence: Synthetic peptide"
GGGCGGGG

SEQ ID NO: 489 - protein, 5 aa, Artificial Sequence
  source: /note="Description of Artificial Sequence: Synthetic peptide"
GPNGG

SEQ ID NO: 490 - protein, 8 aa, Artificial Sequence
  source: /note="Description of Artificial Sequence: Synthetic peptide"
GGGKGGGG

SEQ ID NO: 491 - protein, 5 aa, Artificial Sequence
  source: /note="Description of Artificial Sequence: Synthetic peptide"
GGGGS

SEQ ID NO: 492 - protein, 10 aa, Artificial Sequence
  source: /note="Description of Artificial Sequence: Synthetic peptide"
GGGGSGGGGS

SEQ ID NO: 493 - protein, 25 aa, Artificial Sequence
  source: /note="Description of Artificial Sequence: Synthetic peptide"
GGGGSGGGGSGGGGSGGGGSGGGGS

SEQ ID NO: 494 - protein, 6 aa, Artificial Sequence
  source: /note="Description of Artificial Sequence: Synthetic peptide"
GGEGGG

SEQ ID NO: 495 - protein, 8 aa, Artificial Sequence
  source: /note="Description of Artificial Sequence: Synthetic peptide"
GGEEEGGG

SEQ ID NO: 496 - protein, 5 aa, Artificial Sequence
  source: /note="Description of Artificial Sequence: Synthetic peptide"
GEEEG

SEQ ID NO: 497 - protein, 4 aa, Artificial Sequence
  source: /note="Description of Artificial Sequence: Synthetic peptide"
GEEE

SEQ ID NO: 498 - protein, 6 aa, Artificial Sequence
  source: /note="Description of Artificial Sequence: Synthetic peptide"
GGDGGG

SEQ ID NO: 499 - protein, 7 aa, Artificial Sequence
  source: /note="Description of Artificial Sequence: Synthetic peptide"
GGDDDGG

SEQ ID NO: 500 - protein, 5 aa, Artificial Sequence
  source: /note="Description of Artificial Sequence: Synthetic peptide"
GDDDG

SEQ ID NO: 501 - protein, 4 aa, Artificial Sequence
  source: /note="Description of Artificial Sequence: Synthetic peptide"
GDDD

SEQ ID NO: 502 - protein, 21 aa, Artificial Sequence
  source: /note="Description of Artificial Sequence: Synthetic peptide"
GGGGSDDSDEGSDGEDGGGGS

SEQ ID NO: 503 - protein, 5 aa, Artificial Sequence
  source: /note="Description of Artificial Sequence: Synthetic peptide"
WEWEW

SEQ ID NO: 504 - protein, 5 aa, Artificial Sequence
  source: /note="Description of Artificial Sequence: Synthetic peptide"
FEFEF

SEQ ID NO: 505 - protein, 6 aa, Artificial Sequence
  source: /note="Description of Artificial Sequence: Synthetic peptide"
EEEWWW

SEQ ID NO: 506 - protein, 6 aa, Artificial Sequence
  source: /note="Description of Artificial Sequence: Synthetic peptide"
EEEFFF

SEQ ID NO: 507 - protein, 7 aa, Artificial Sequence
  source: /note="Description of Artificial Sequence: Synthetic peptide"
WWEEEWW

SEQ ID NO: 508 - protein, 7 aa, Artificial Sequence
  source: /note="Description of Artificial Sequence: Synthetic peptide"
FFEEEFF

SEQ ID NO: 509 - protein, 6 aa, Artificial Sequence
  source: /note="Description of Artificial Sequence: Synthetic peptide"
  MOD_RES (1)..(2): Any amino acid
  MOD_RES (4)..(5): Any amino acid
XXYXXG

SEQ ID NO: 510 - protein, 6 aa, Artificial Sequence
  source: /note="Description of Artificial Sequence: Synthetic peptide"
  MOD_RES (1)..(2): Any amino acid
  MOD_RES (4)..(5): Any amino acid
XXSXXG

SEQ ID NO: 511 - protein, 6 aa, Artificial Sequence
  source: /note="Description of Artificial Sequence: Synthetic peptide"
  MOD_RES (1)..(2): Any amino acid
  MOD_RES (4)..(5): Any amino acid
XXTXXG

SEQ ID NO: 512 - protein, 22 aa, Artificial Sequence
  source: /note="Description of Artificial Sequence: Synthetic peptide"
GSGSATGGSGSTASSGSGSATH

SEQ ID NO: 513 - protein, 22 aa, Artificial Sequence
  source: /note="Description of Artificial Sequence: Synthetic peptide"
HGSGSATGGSGSTASSGSGSAT

SEQ ID NO: 514 - protein, 19 aa, Artificial Sequence
  source: /note="Description of Artificial Sequence: Synthetic peptide"
AEAAAKEAAAKEAAAKAGG

SEQ ID NO: 515 - protein, 5 aa, Artificial Sequence
  source: /note="Description of Artificial Sequence: Synthetic peptide"
  MOD_RES (2)..(4): Any amino acid
KXXXD

SEQ ID NO: 516 - protein, 34 aa, Artificial Sequence
  source: /note="Description of Artificial Sequence: Synthetic polypeptide"
  source: /note="N-term optionally acetylated, biotinylated, 4-pentynoylated, or PEGylated"
  MOD_RES (1)..(2): Any amino acid or absent
  MOD_RES (3)..(3): Any amino acid
  VARIANT (4)..(4): /replace="SeCys"
  MOD_RES (5)..(5): Any neutral hydrophilic or basic amino acid residue
  MOD_RES (6)..(6): Any basic amino acid residue
  VARIANT (7)..(7): /replace="5-bromoTrp" or "6-bromoTrp" or "5-chloroTrp" or "6-chloroTrp" or "1-Nal" or "2-Nal" or "thioTrp"
  VARIANT (8)..(8): /replace="Nle" or "Nva" or "Leu" or "Ile" or "Val" or "Phe"
  VARIANT (9)..(9): /replace="5-bromoTrp" or "6-bromoTrp" or "5-chloroTrp" or "6-chloroTrp" or "1-Nal" or "2-Nal" or "thioTrp"
  VARIANT (10)..(10): /replace="Any basic or neutral hydrophilic amino acid residue"
  VARIANT (11)..(11): /replace="SeCys"
  MOD_RES (13)..(13): Any amino acid residue except a hydrophobic residue
  VARIANT (14)..(14): /replace="Any basic residue"
  MOD_RES (16)..(16): Any amino acid
  VARIANT (17)..(18): /replace="SeCys"
  MOD_RES (19)..(19): Any amino acid
  VARIANT (20)..(20): /replace="Ala"
  VARIANT (22)..(22): /replace="Any acidic or basic amino acid residue"
  VARIANT (23)..(23): /replace="SeCys"
  VARIANT (24)..(24): /replace="Any basic amino acid"
  VARIANT (26)..(26): /replace="5-bromoTrp" or "6-bromoTrp" or "5-chloroTrp" or "6-chloroTrp" or "1-Nal" or "2-Nal" or "thioTrp"
  VARIANT (27)..(27): /replace="SeCys"
  MOD_RES (28)..(29): Any basic amino acid residue
  VARIANT (30)..(30): /replace="Trp" or "Tyr" or "5-bromoTrp" or "6-bromoTrp" or "5-chloroTrp" or "6-chloroTrp" or "1-Nal" or "2-Nal" or "thioTrp" or "any acidic amino acid residue"
  MOD_RES (31)..(31): Any acidic amino acid residue
  MOD_RES (32)..(34): Independently absent or independently any hydrophobic amino acid residue
  source: /note="C-term optionally amidated"
  misc_feature (1)..(34): /note="Variant residues given in the sequence have no preference with respect to those in the annotations for variant positions"
  source: /note="see specification as filed for detailed description of substitutions and preferred embodiments"
XXXCXXWMWACDXARXCCXGLACALWCXXIXXXX

SEQ ID NO: 517 - protein, 34 aa, Artificial Sequence
  source: /note="Description of Artificial Sequence: Synthetic polypeptide"
  source: /note="N-term optionally acetylated, biotinylated, 4-pentynoylated, or PEGylated"
  MOD_RES (1)..(1): Any amino acid or absent
  VARIANT (2)..(2): /replace="Any hydrophobic amino acid residue" or "Pra" or "Aha" or "Abu" or "Nva" or "Nle" or "Sar" or "hLeu" or "hPhe" or "D-Leu" or "D-Phe" or "D-Ala" or "bAla" or "AllylG" or "CyA" or "Atz"
  MOD_RES (3)..(3): Any amino acid
  VARIANT (4)..(4): /replace="SeCys"
  MOD_RES (5)..(5): Any neutral hydrophilic or basic amino acid residue
  MOD_RES (6)..(6): Any basic amino acid residue
  VARIANT (7)..(7): /replace="5-bromoTrp" or "6-bromoTrp" or "5-chloroTrp" or "6-chloroTrp" or "1-Nal" or "2-Nal" or "thioTrp"
  VARIANT (8)..(8): /replace="Nle"
  VARIANT (9)..(9): /replace="5-bromoTrp" or "6-bromoTrp" or "5-chloroTrp" or "6-chloroTrp" or "1-Nal" or "2-Nal" or "thioTrp"
  VARIANT (10)..(10): /replace="Any basic or neutral hydrophilic amino acid residue"
  VARIANT (11)..(11): /replace="SeCys"
  MOD_RES (13)..(13): Any amino acid residue except a hydrophobic residue
  VARIANT (14)..(14): /replace="Any basic residue"
  MOD_RES (16)..(16): Any amino acid
  VARIANT (17)..(18): /replace="SeCys"
  MOD_RES (19)..(19): Any amino acid
  VARIANT (20)..(20): /replace="Ala"
  VARIANT (22)..(22): /replace="Any basic amino acid residue"
  VARIANT (23)..(23): /replace="SeCys"
  VARIANT (24)..(24): /replace="Any basic amino acid residue"
  VARIANT (26)..(26): /replace="5-bromoTrp" or "6-bromoTrp" or "5-chloroTrp" or "6-chloroTrp" or "1-Nal" or "2-Nal" or "thioTrp"
  VARIANT (27)..(27): /replace="SeCys"
  MOD_RES (28)..(29): Any basic amino acid residue
  VARIANT (30)..(31): /replace="Trp" or "Tyr" or "5-bromoTrp" or "6-bromoTrp" or "5-chloroTrp" or "6-chloroTrp" or "1-Nal" or "2-Nal" or "thioTrp"
  MOD_RES (32)..(34): Independently absent or is independently a hydrophobic amino acid residue
  source: /note="C-term optionally amidated"
  misc_feature (1)..(34): /note="Variant residues given in the sequence have no preference with respect to those in the annotations for variant positions"
  source: /note="see specification as filed for detailed description of substitutions and preferred embodiments"
XXXCXXWLWACDXARXCCXGLACALWCXXIIXXX

SEQ ID NO: 518 - protein, 30 aa, Artificial Sequence
  source: /note="Description of Artificial Sequence: Synthetic polypeptide"
  source: /note="N-term Amino group"
  MOD_RES (1)..(1): CyA
  MOD_RES (2)..(2): Pra
  MOD_RES (7)..(7): Nle
  source: /note="C-term Amide"
AGCQKWLWTCDSKRACCEGLRCKLWCRKEI

SEQ ID NO: 519 - protein, 30 aa, Artificial Sequence
  source: /note="Description of Artificial Sequence: Synthetic polypeptide"
  source: /note="N-term Amino group"
  MOD_RES (1)..(1): CyA
  MOD_RES (7)..(7): Nle
  MOD_RES (11)..(11): Pra
  source: /note="C-term Amide"
AYCQKWLWTCGSKRACCEGLRCKLWCRKEI

SEQ ID NO: 520 - protein, 30 aa, Artificial Sequence
  source: /note="Description of Artificial Sequence: Synthetic polypeptide"
  source: /note="N-term Amino group"
  MOD_RES (1)..(1): CyA
  MOD_RES (7)..(7): Nle
  MOD_RES (12)..(12): Pra
  source: /note="C-term Amide"
AYCQKWLWTCDGKRACCEGLRCKLWCRKEI

SEQ ID NO: 521 - protein, 30 aa, Artificial Sequence
  source: /note="Description of Artificial Sequence: Synthetic polypeptide"
  source: /note="N-term Amino group"
  MOD_RES (1)..(1): CyA
  MOD_RES (7)..(7): Nle
  MOD_RES (13)..(13): Pra
  source: /note="C-term Amide"
AYCQKWLWTCDSGRACCEGLRCKLWCRKEI

SEQ ID NO: 522 - protein, 30 aa, Artificial Sequence
  source: /note="Description of Artificial Sequence: Synthetic polypeptide"
  source: /note="N-term Amino group"
  MOD_RES (1)..(1): CyA
  MOD_RES (7)..(7): Nle
  MOD_RES (14)..(14): Pra
  source: /note="C-term Amide"
AYCQKWLWTCDSKGACCEGLRCKLWCRKEI

SEQ ID NO: 523 - protein, 30 aa, Artificial Sequence; identical to SEQ ID NO: 338
  source: /note="Description of Artificial Sequence: Synthetic polypeptide"
  source: /note="N-term Amino group"
  MOD_RES (1)..(1): CyA
  MOD_RES (7)..(7): Nle
  MOD_RES (19)..(19): Pra
  source: /note="C-term Amide"

SEQ ID NO: 524 - protein, 30 aa, Artificial Sequence
  source: /note="Description of Artificial Sequence: Synthetic polypeptide"
  source: /note="N-term Amino group"
  MOD_RES (1)..(1): CyA
  MOD_RES (7)..(7): Nle
  MOD_RES (20)..(20): Pra
  source: /note="C-term Amide"
AYCQKWLWTCDSKRACCEGGRCKLWCRKEI

SEQ ID NO: 525 - protein, 30 aa, Artificial Sequence
  source: /note="Description of Artificial Sequence: Synthetic polypeptide"
  source: /note="N-term Amino group"
  MOD_RES (1)..(1): CyA
  MOD_RES (7)..(7): Nle
  MOD_RES (21)..(21): Pra
  source: /note="C-term Amide"
AYCQKWLWTCDSKRACCEGLGCKLWCRKEI

SEQ ID NO: 526 - protein, 30 aa, Artificial Sequence
  source: /note="Description of Artificial Sequence: Synthetic polypeptide"
  source: /note="N-term Amino group"
  MOD_RES (1)..(1): CyA
  MOD_RES (2)..(2): Pra
  MOD_RES (7)..(7): Nle
  source: /note="C-term Amide"
AGCQKWLWTCDSKRACCEGLRCKLWCRKEW

SEQ ID NO: 527 - protein, 30 aa, Artificial Sequence
  source: /note="Description of Artificial Sequence: Synthetic polypeptide"
  source: /note="N-term Amino group"
  MOD_RES (1)..(1): CyA
  MOD_RES (7)..(7): Nle
  MOD_RES (11)..(11): Pra
  source: /note="C-term Amide"
AYCQKWLWTCGSKRACCEGLRCKLWCRKEW

SEQ ID NO: 528 - protein, 35 aa, Ornithoctonus huwena
  source: /note="C-term Amide"
ECLEIFKACNPSNDQCCKSSKLVCSRKTRWCKYQI

SEQ ID NO: 529 - protein, 33 aa, Ornithoctonus huwena
ACKGVFDACTPGKNECCPNRVCSDKHKWCKWKL

SEQ ID NO: 530 - protein, 16 aa, Conus kinoshitai
  source: /note="C-term Amide"
CCNCSSKWCRDHSRCC

SEQ ID NO: 531 - protein, 30 aa, Thrixopelma pruriens
YCQKWMWTCDSERKCCEGMVCRLWCKKKLW

SEQ ID NO: 532 - protein, 34 aa, Grammostola porteri
  source: /note="C-term Amide"
DCLGFMRKCIPDNDKCCRPNLVCSRTHKWCKYVF

SEQ ID NO: 533 - protein, 326 aa, Homo sapiens
ASTKGPSVFPLAPCSRSTSESTAALGCLVKDYFPEPVTVSWNSGALTSGVHTFPAVLQSSGLYSLSSVVTVPSSNFGTQTYTCNVDHKPSNTKVDKTVERKCCVECPPCPAPPVAGPSVFLFPPKPKDTLMISRTPEVTCVVVDVSHEDPEVQFNWYVDGVEVHNAKTKPREEQFNSTFRVVSVLTVVHQDWLNGKEYKCKVSNKGLPAPIEKTISKTKGQPREPQVYTLPPSREEMTKNQVSLTCLVKGFYPSDIAVEWESNGQPENNYKTTPPMLDSDGSFFLYSKLTVDKSRWQQGNVFSCSVMHEALHNHYTQKSLSLSPGK

SEQ ID NO: 534 - protein, 330 aa, Homo sapiens
ASTKGPSVFPLAPSSKSTSGGTAALGCLVKDYFPEPVTVSWNSGALTSGVHTFPAVLQSSGLYSLSSVVTVPSSSLGTQTYICNVNHKPSNTKVDKKVEPKSCDKTHTCPPCPAPELLGGPSVFLFPPKPKDTLMISRTPEVTCVVVDVSHEDPEVKFNWYVDGVEVHNAKTKPREEQYNSTYRVVSVLTVLHQDWLNGKEYKCKVSNKALPAPIEKTISKAKGQPREPQVYTLPPSREEMTKNQVSLTCLVKGFYPSDIAVEWESNGQPENNYKTTPPVLDSDGSFFLYSKLTVDKSRWQQGNVFSCSVMHEALHNHYTQKSLSLSPGK

SEQ ID NO: 535 - protein, 330 aa, Homo sapiens [sequence omitted]

SEQ ID NO: 536 - protein, 330 aa, Homo sapiens
ASTKGPSVFPLAPSSKSTSGGTAALGCLVKDYFPEPVTVSWNSGALTSGVHTFPAVLQSSGLYSLSSVVTVPSSSLGTQTYICNVNHKPSNTKVDKRVEPKSCDKTHTCPPCPAPELLGGPSVFLFPPKPKDTLMISRTPEVTCVVVDVSHEDPEVKFNWYVDGVEVHNAKTKPREEQYNSTYRVVSVLTVLHQDWLNGKEYKCKVSNKALPAPIEKTISKAKGQPREPQVYTLPPSREEMTKNQVSLTCLVKGFYPSDIAVEWESNGQPENNYKTTPPVLDSDGSFFLYSKLTVDKSRWQQGNVFSCSVMHEALHNHYTQKSLSLSPGK

SEQ ID NO: 537 - protein, 330 aa, Homo sapiens
ASTKGPSVFPLAPSSKSTSGGTAALGCLVKDYFPEPVTVSWNSGALTSGVHTFPAVLQSSGLYSLSSVVTVPSSSLGTQTYICNVNHKPSNTKVDKRVEPKSCDKTHTCPPCPAPELLGGPSVFLFPPKPKDTLMISRTPEVTCVVVDVSHEDPEVKFNWYVDGVEVHNAKTKPREEQYNSTYRVVSVLTVLHQDWLNGKEYKCKVSNKALPAPIEKTISKAKGQPREPQVYTLPPSRDELTKNQVSLTCLVKGFYPSDIAVEWESNGQPENNYKTTPPVLDSDGSFFLYSKLTVDKSRWQQGNVFSCSVMHEALHNHYTQKSLSLSPGK

SEQ ID NO: 538 - protein, 106 aa, Homo sapiens
GQPKANPTVTLFPPSSEELQANKATLVCLISDFYPGAVTVAWKADGSPVKAGVETTKPSKQSNNKYAASSYLSLTPEQWKSHRSYSCQVTHEGSTVEKTVAPTECS

SEQ ID NO: 539 - protein, 106 aa, Homo sapiens
GQPKAAPSVTLFPPSSEELQANKATLVCLISDFYPGAVTVAWKADSSPVKAGVETTTPSKQSNNKYAASSYLSLTPEQWKSHRSYSCQVTHEGSTVEKTVAPTECS

SEQ ID NO: 540 - protein, 106 aa, Homo sapiens
GQPKAAPSVTLFPPSSEELQANKATLVCLISDFYPGAVTVAWKADSSPVKAGVETTTPSKQSNNKYAASSYLSLTPEQWKSHKSYSCQVTHEGSTVEKTVAPTECS

SEQ ID NO: 541 - protein, 106 aa, Homo sapiens
GQPKAAPSVTLFPPSSEELQANKATLVCLVSDFYPGAVTVAWKADGSPVKVGVETTKPSKQSNNKYAASSYLSLTPEQWKSHRSYSCRVTHEGSTVEKTVAPAECS

SEQ ID NO: 542 - protein, 448 aa, Artificial Sequence
  source: /note="Description of Artificial Sequence: Synthetic polypeptide"
QVQLVESGGGVVQPGRSLRLSCAASGFTFSSYGMHWVRQAPGKGLEWVAVIWYDGSNKYYADSVKGRFTISRDNSKNTLYLQMNSLRAEDTAVYYCARYNFNYGMDVWGQGTTVTVSSASTKGPSVFPLAPSSKSTSGGTAALGCLVKDYFPEPVTVSWNSGALTSGVHTFPAVLQSSGLYSLSSVVTVPSSSLGTQTYICNVNHKPSNTKVDKKVEPKSCDKTHTCPPCPAPELLGGPSVFLFPPKPKDTLMISRTPEVTCVVVDVSHEDPCVKFNWYVDGVEVHNAKTKPREEQYNSTYRVVSVLTVLHQDWLNGKEYKCKVSNKALPAPIEKTISKAKGQPREPQVYTLPPSREEMTKNQVSLTCLVKGFYPSDIAVEWESNGQPENNYKTTPPVLDSDGSFFLYSKLTVDKSRWQQGNVFSCSVMHEALHNHYTQKSLSLSPGK

SEQ ID NO: 543 - protein, 214 aa, Artificial Sequence
  source: /note="Description of Artificial Sequence: Synthetic polypeptide"
DIQMTQSPSSVSASVGDRVTITCRASQGISRRLAWYQQKPGKAPKLLIYAASSLQSGVPSRFSGSGSGTDFTLTISSLQPEDFATYYCQQANSFPFTFGPGTKVDIKRTVAAPSVFIFPPSDEQLKSGTASVVCLLNNFYPREAKVQWKVDNALQSGNSQESVTEQDSKDSTYSLSSTLTLSKADYEKHKVYACEVTHQGLSSPVTKSFNRGEC

SEQ ID NO: 544 - protein, 227 aa, Artificial Sequence
  source: /note="Description of Artificial Sequence: Synthetic polypeptide"
DKTHTCPPCPAPELLGGPSVFLFPPKPKDTLMISRTPEVTCVVVDVSHEDPCVKFNWYVDGVEVHNAKTKPREEQYNSTYRVVSVLTVLHQDWLNGKEYKCKVSNKALPAPIEKTISKAKGQPREPQVYTLPPSREEMTKNQVSLTCLVKGFYPSDIAVEWESNGQPENNYKTTPPVLDSDGSFFLYSKLTVDKSRWQQGNVFSCSVMHEALHNHYTQKSLSLSPGK

SEQ ID NO: 545 - protein, 30 aa, Artificial Sequence
  source: /note="Description of Artificial Sequence: Synthetic polypeptide"
  source: /note="N-term Amino group"
  MOD_RES (1)..(1): CyA
  MOD_RES (7)..(7): Nle
  MOD_RES (21)..(21): Lys(NPeg11)
  source: /note="C-term Amide"
AYCQKWLWTCDSKRACCEGLKCKLWCRKII

SEQ ID NO: 546 - protein, 30 aa, Artificial Sequence
  source: /note="Description of Artificial Sequence: Synthetic polypeptide"
  source: /note="N-term Amino group"
  MOD_RES (1)..(1): CyA
  MOD_RES (7)..(7): Nle
  MOD_RES (15)..(15): Lys(NPeg11)
  source: /note="C-term Amide"
AYCQKWLWVCDSKRKCCEGLRCKLWCRKEI

SEQ ID NO: 547 - protein, 30 aa, Artificial Sequence
  source: /note="Description of Artificial Sequence: Synthetic polypeptide"
  source: /note="N-term Amino group"
  MOD_RES (1)..(1): CyA
  MOD_RES (7)..(7): Nle
  MOD_RES (18)..(18): Lys(NPeg11)
  source: /note="C-term Amide"
AYCQKWLWVCDSKRACCKGLRCKLWCRKEI

SEQ ID NO: 548 - protein, 30 aa, Artificial Sequence
  source: /note="Description of Artificial Sequence: Synthetic polypeptide"
  source: /note="N-term Amino group"
  MOD_RES (1)..(1): CyA
  MOD_RES (7)..(7): Nle
  MOD_RES (15)..(15): Lys(NPeg11)
  source: /note="C-term Amide"
AYCLKWLWTCDSKRKCCEGLRCKLWCRKEI

SEQ ID NO: 549 - protein, 30 aa, Artificial Sequence
  source: /note="Description of Artificial Sequence: Synthetic polypeptide"
  source: /note="N-term Amino group"
  MOD_RES (1)..(1): CyA
  MOD_RES (7)..(7): Nle
  MOD_RES (18)..(18): Lys(NPeg11)
  source: /note="C-term Amide"
AYCLKWLWTCDSKRACCKGLRCKLWCRKEI

SEQ ID NO: 550 - protein, 30 aa, Artificial Sequence
  source: /note="Description of Artificial Sequence: Synthetic polypeptide"
  source: /note="N-term Amino group"
  MOD_RES (1)..(1): CyA
  MOD_RES (7)..(7): Nle
  MOD_RES (15)..(15): Lys(NPeg11)
  source: /note="C-term Amide"
AFCQKWLWTCDSKRKCCEGLRCKLWCRKEI

SEQ ID NO: 551 - protein, 30 aa, Artificial Sequence
  source: /note="Description of Artificial Sequence: Synthetic polypeptide"
  source: /note="N-term Amino group"
  MOD_RES (1)..(1): CyA
  MOD_RES (7)..(7): Nle
  MOD_RES (18)..(18): Lys(NPeg11)
  source: /note="C-term Amide"
AFCQKWLWTCDSKRACCKGLRCKLWCRKEI

SEQ ID NO: 552 - protein, 30 aa, Artificial Sequence
  source: /note="Description of Artificial Sequence: Synthetic polypeptide"
  source: /note="N-term Amino group"
  MOD_RES (1)..(1): CyA
  MOD_RES (5)..(5): Nle
  MOD_RES (7)..(7): Nle
  MOD_RES (15)..(15): Lys(NPeg11)
  source: /note="C-term Amide"
AYCQLWLWTCDSKRKCCEGLRCKLWCRKEI

SEQ ID NO: 553 - protein, 30 aa, Artificial Sequence
  source: /note="Description of Artificial Sequence: Synthetic polypeptide"
  source: /note="N-term Amino group"
  MOD_RES (1)..(1): CyA
  MOD_RES (5)..(5): Nle
  MOD_RES (7)..(7): Nle
  MOD_RES (18)..(18): Lys(NPeg11)
  source: /note="C-term Amide"
AYCQLWLWTCDSKRACCKGLRCKLWCRKEI

SEQ ID NO: 554 - protein, 30 aa, Artificial Sequence
  source: /note="Description of Artificial Sequence: Synthetic polypeptide"
  source: /note="N-term Amino group"
  MOD_RES (1)..(1): CyA
  MOD_RES (7)..(7): Nle
  MOD_RES (15)..(15): Lys(NPeg11)
  MOD_RES (23)..(23): Nle
  source: /note="C-term Amide"
AYCQKWLWTCDSKRKCCEGLRCLLWCRKEI

SEQ ID NO: 555 - protein, 30 aa, Artificial Sequence
  source: /note="Description of Artificial Sequence: Synthetic polypeptide"
  source: /note="N-term Amino group"
  MOD_RES (1)..(1): CyA
  MOD_RES (7)..(7): Nle
  MOD_RES (18)..(18): Lys(NPeg11)
  MOD_RES (23)..(23): Nle
  source: /note="C-term Amide"
AYCQKWLWTCDSKRACCKGLRCLLWCRKEI

SEQ ID NO: 556 - protein, 30 aa, Artificial Sequence
  source: /note="Description of Artificial Sequence: Synthetic polypeptide"
  source: /note="N-term Amino group"
  MOD_RES (1)..(1): CyA
  MOD_RES (7)..(7): Nle
  MOD_RES (15)..(15): Lys(NPeg11)
  MOD_RES (28)..(28): Nle
  source: /note="C-term Amide"
AYCQKWLWTCDSKRKCCEGLRCKLWCRLEI

SEQ ID NO: 557 - protein, 30 aa, Artificial Sequence
  source: /note="Description of Artificial Sequence: Synthetic polypeptide"
  source: /note="N-term Amino group"
  MOD_RES (1)..(1): CyA
  MOD_RES (7)..(7): Nle
  MOD_RES (18)..(18): Lys(NPeg11)
  MOD_RES (28)..(28): Nle
  source: /note="C-term Amide"
AYCQKWLWTCDSKRACCKGLRCKLWCRLEI

SEQ ID NO: 558 - protein, 30 aa, Artificial Sequence
  source: /note="Description of Artificial Sequence: Synthetic polypeptide"
  source: /note="N-term Amino group"
  MOD_RES (1)..(1): CyA
  MOD_RES (7)..(7): Nle
  MOD_RES (15)..(15): Lys(NPeg11)
  source: /note="C-term Amide"
AYCQKWLWTCDSKRKCCEGLRCKLWCKKEI

SEQ ID NO: 559 - protein, 30 aa, Artificial Sequence
  source: /note="Description of Artificial Sequence: Synthetic polypeptide"
  source: /note="N-term Amino group"
  MOD_RES (1)..(1): CyA
  MOD_RES (7)..(7): Nle
  MOD_RES (18)..(18): Lys(NPeg11)
  source: /note="C-term Amide"
AYCQKWLWTCDSKRACCKGLRCKLWCKKEI

SEQ ID NO: 560 - protein, 30 aa, Artificial Sequence
  source: /note="Description of Artificial Sequence: Synthetic polypeptide"
  source: /note="N-term Amino group"
  MOD_RES (1)..(1): CyA
  MOD_RES (7)..(7): Nle
  MOD_RES (13)..(13): Nle
  MOD_RES (15)..(15): Lys(NPeg11)
  source: /note="C-term Amide"
AYCQKWLWTCDSLRKCCEGLRCKLWCRKEI

SEQ ID NO: 561 - protein, 30 aa, Artificial Sequence
  source: /note="Description of Artificial Sequence: Synthetic polypeptide"
  source: /note="N-term Amino group"
  MOD_RES (1)..(1): CyA
  MOD_RES (7)..(7): Nle
  MOD_RES (13)..(13): Nle
  MOD_RES (18)..(18): Lys(NPeg11)
  source: /note="C-term Amide"
AYCQKWLWTCDSLRACCKGLRCKLWCRKEI

SEQ ID NO: 562 - protein, 30 aa, Artificial Sequence
  source: /note="Description of Artificial Sequence: Synthetic polypeptide"
  source: /note="N-term Amino group"
  MOD_RES (1)..(1): CyA
  MOD_RES (7)..(7): Nle
  MOD_RES (18)..(18): Lys(NPeg11)
  source: /note="C-term Amide"
AYCQKWLWTCDSKRFCCKGLRCKLWCRKEI

SEQ ID NO: 563 - protein, 30 aa, Artificial Sequence
  source: /note="Description of Artificial Sequence: Synthetic polypeptide"
  source: /note="N-term Amino group"
  MOD_RES (1)..(1): CyA
  MOD_RES (2)..(2): Lys(NPeg11)
  MOD_RES (7)..(7): Nle
  source: /note="C-term Amide"
AKCQKWLWTCDSKRACCEGLRCKLWCRKEI

SEQ ID NO: 564 - protein, 30 aa, Artificial Sequence
  source: /note="Description of Artificial Sequence: Synthetic polypeptide"
  source: /note="N-term Amino group"
  MOD_RES (1)..(1): CyA
  MOD_RES (7)..(7): Nle
  MOD_RES (11)..(11): Lys(NPeg11)
  source: /note="C-term Amide"
AYCQKWLWTCKSKRACCEGLRCKLWCRKEI

SEQ ID NO: 565 - protein, 30 aa, Artificial Sequence
  source: /note="Description of Artificial Sequence: Synthetic polypeptide"
  source: /note="N-term Amino group"
  MOD_RES (1)..(1): CyA
  MOD_RES (7)..(7): Nle
  MOD_RES (12)..(12): Lys(NPeg11)
  source: /note="C-term Amide"
AYCQKWLWTCDKKRACCEGLRCKLWCRKEI

SEQ ID NO: 566 - protein, 30 aa, Artificial Sequence; identical to SEQ ID NO: 338
  source: /note="Description of Artificial Sequence: Synthetic polypeptide"
  source: /note="N-term Amino group"
  MOD_RES (1)..(1): CyA
  MOD_RES (7)..(7): Nle
  MOD_RES (13)..(13): Lys(NPeg11)
  source: /note="C-term Amide"

SEQ ID NO: 567 - protein, 30 aa, Artificial Sequence
  source: /note="Description of Artificial Sequence: Synthetic polypeptide"
  source: /note="N-term Amino group"
  MOD_RES (1)..(1): CyA
  MOD_RES (7)..(7): Nle
  MOD_RES (14)..(14): Lys(NPeg11)
  source: /note="C-term Amide"
AYCQKWLWTCDSKKACCEGLRCKLWCRKEI

SEQ ID NO: 568 - protein, 30 aa, Artificial Sequence
  source: /note="Description of Artificial Sequence: Synthetic polypeptide"
  source: /note="N-term Amino group"
  MOD_RES (1)..(1): CyA
  MOD_RES (7)..(7): Nle
  MOD_RES (19)..(19): Lys(NPeg11)
  source: /note="C-term Amide"
AYCQKWLWTCDSKRACCEKLRCKLWCRKEI

SEQ ID NO: 569 - protein, 30 aa, Artificial Sequence
  source: /note="Description of Artificial Sequence: Synthetic polypeptide"
  source: /note="N-term Amino group"
  MOD_RES (1)..(1): CyA
  MOD_RES (7)..(7): Nle
  MOD_RES (20)..(20): Lys(NPeg11)
  source: /note="C-term Amide"
AYCQKWLWTCDSKRACCEGKRCKLWCRKEI

SEQ ID NO: 570 - protein, 30 aa, Artificial Sequence
  source: /note="Description of Artificial Sequence: Synthetic polypeptide"
  source: /note="N-term Amino group"
  MOD_RES (1)..(1): CyA
  MOD_RES (7)..(7): Nle
  MOD_RES (21)..(21): Lys(NPeg11)
  source: /note="C-term Amide"
AYCQKWLWTCDSKRACCEGLKCKLWCRKEI

SEQ ID NO: 571 - protein, 30 aa, Artificial Sequence; identical to SEQ ID NO: 247
  source: /note="Description of Artificial Sequence: Synthetic polypeptide"
  source: /note="N-term Amino group"
  MOD_RES (1)..(1): Atz
  MOD_RES (7)..(7): Nle
  source: /note="C-term Amide"

SEQ ID NO: 572 - protein, 30 aa, Artificial Sequence; identical to SEQ ID NO: 247
  source: /note="Description of Artificial Sequence: Synthetic polypeptide"
  source: /note="N-term Amino group"
  MOD_RES (1)..(1): Atz
  MOD_RES (7)..(7): Nle
  source: /note="C-term Amide"

SEQ ID NO: 573 - protein, 30 aa, Artificial Sequence
  source: /note="Description of Artificial Sequence: Synthetic polypeptide"
  source: /note="N-term Amino group"
  MOD_RES (1)..(1): CyA
  MOD_RES (7)..(7): Nle
  MOD_RES (12)..(12): Pra
  source: /note="C-term Amide"
AYCQKWLWTCDGKRACCEGLRCKLWCRKEW

SEQ ID NO: 574 - protein, 30 aa, Artificial Sequence
  source: /note="Description of Artificial Sequence: Synthetic polypeptide"
  source: /note="N-term Amino group"
  MOD_RES (1)..(1): CyA
  MOD_RES (7)..(7): Nle
  MOD_RES (13)..(13): Pra
  source: /note="C-term Amide"
AYCQKWLWTCDSGRACCEGLRCKLWCRKEW

SEQ ID NO: 575 - protein, 30 aa, Artificial Sequence
  source: /note="Description of Artificial Sequence: Synthetic polypeptide"
  source: /note="N-term Amino group"
  MOD_RES (1)..(1): CyA
  MOD_RES (7)..(7): Nle
  MOD_RES (14)..(14): Pra
  source: /note="C-term Amide"
AYCQKWLWTCDSKGACCEGLRCKLWCRKEW

SEQ ID NO: 576 - protein, 30 aa, Artificial Sequence
  source: /note="Description of Artificial Sequence: Synthetic polypeptide"
  source: /note="N-term Amino group"
  MOD_RES (1)..(1): CyA
  MOD_RES (7)..(7): Nle
  MOD_RES (19)..(19): Pra
  source: /note="C-term Amide"
AYCQKWLWTCDSKRACCEGLRCKLWCRKEW

SEQ ID NO: 577 - protein, 30 aa, Artificial Sequence
  source: /note="Description of Artificial Sequence: Synthetic polypeptide"
  source: /note="N-term Amino group"
  MOD_RES (1)..(1): CyA
  MOD_RES (7)..(7): Nle
  MOD_RES (20)..(20): Pra
  source: /note="C-term Amide"
AYCQKWLWTCDSKRACCEGGRCKLWCRKEW

SEQ ID NO: 578 - protein, 30 aa, Artificial Sequence
  source: /note="Description of Artificial Sequence: Synthetic polypeptide"
  source: /note="N-term Amino group"
  MOD_RES (1)..(1): CyA
  MOD_RES (7)..(7): Nle
  MOD_RES (21)..(21): Pra
  source: /note="C-term Amide"
AYCQKWLWTCDSKRACCEGLGCKLWCRKEW

SEQ ID NO: 579 - protein, 30 aa, Artificial Sequence; identical to SEQ ID NO: 391
  source: /note="Description of Artificial Sequence: Synthetic polypeptide"
  source: /note="N-term Amino group"
  MOD_RES (1)..(1): CyA
  MOD_RES (2)..(2): Pra
  MOD_RES (7)..(7): Nle
  source: /note="C-term Amide"

SEQ ID NO: 580 - protein, 30 aa, Artificial Sequence
  source: /note="Description of Artificial Sequence: Synthetic polypeptide"
  source: /note="N-term Amino group"
  MOD_RES (1)..(1): Nva
  MOD_RES (2)..(2): Pra
  MOD_RES (7)..(7): Nle
  source: /note="C-term Amide"
VGCQKWLWTCDSKRACCEGLRCKLWCRKII

SEQ ID NO: 581 - protein, 30 aa, Artificial Sequence
  source: /note="Description of Artificial Sequence: Synthetic polypeptide"
  source: /note="N-term Amino group"
  MOD_RES (2)..(2): Pra
  MOD_RES (7)..(7): Nle
  source: /note="C-term Amide"
LGCQKWLWTCDSKRACCEGLRCKLWCRKII

SEQ ID NO: 582 - protein, 30 aa, Artificial Sequence; identical to SEQ ID NO: 581
  source: /note="Description of Artificial Sequence: Synthetic polypeptide"
  source: /note="N-term Amino group"
  MOD_RES (1)..(1): D-residue
  MOD_RES (2)..(2): Pra
  MOD_RES (7)..(7): Nle
  source: /note="C-term Amide"

SEQ ID NO: 583 - protein, 31 aa, Artificial Sequence
  source: /note="Description of Artificial Sequence: Synthetic polypeptide"
  source: /note="N-term Amino group"
  MOD_RES (3)..(3): Pra
  MOD_RES (8)..(8): Nle
  source: /note="C-term Amide"
LLGCQKWLWTCDSKRACCEGLRCKLWCRKII

SEQ ID NO: 584 - protein, 30 aa, Artificial Sequence; identical to SEQ ID NO: 391
  source: /note="Description of Artificial Sequence: Synthetic polypeptide"
  source: /note="N-term Amino group"
  MOD_RES (1)..(1): CyA
  MOD_RES (2)..(2): Pra
  source: /note="C-term Amide"

SEQ ID NO: 585 - protein, 30 aa, Artificial Sequence; identical to SEQ ID NO: 580
  source: /note="Description of Artificial Sequence: Synthetic polypeptide"
  source: /note="N-term Amino group"
  MOD_RES (1)..(1): Nva
  MOD_RES (2)..(2): Pra
  source: /note="C-term Amide"

SEQ ID NO: 586 - protein, 30 aa, Artificial Sequence; identical to SEQ ID NO: 581
  source: /note="Description of Artificial Sequence: Synthetic polypeptide"
  source: /note="N-term Amino group"
  MOD_RES (2)..(2): Pra
  source: /note="C-term Amide"

SEQ ID NO: 587 - protein, 30 aa, Artificial Sequence; identical to SEQ ID NO: 581
  source: /note="Description of Artificial Sequence: Synthetic polypeptide"
  source: /note="N-term Amino group"
  MOD_RES (1)..(1): D-residue
  MOD_RES (2)..(2): Pra
  source: /note="C-term Amide"

SEQ ID NO: 588 - protein, 31 aa, Artificial Sequence; identical to SEQ ID NO: 583
  source: /note="Description of Artificial Sequence: Synthetic polypeptide"
  source: /note="N-term Amino group"
  MOD_RES (3)..(3): Pra
  source: /note="C-term Amide"

SEQ ID NO: 589 - protein, 65 aa, Odontobuthus doriae
  source: /note="C-term Amide"
GVRDAYIADDKNCVYTCASNGYCNTECTKNGAESGYCQWIGRYGNACWCIKLPDEVPIRIPGKCR

SEQ ID NO: 590 - protein, 34 aa, Artificial Sequence
  source: /note="Description of Artificial Sequence: Synthetic polypeptide"
  source: /note="N-term optionally acetylated, biotinylated, 4-pentynoylated, or PEGylated"
  MOD_RES (1)..(2): Any amino acid or absent
  MOD_RES (3)..(3): Any amino acid
  VARIANT (4)..(4): /replace="SeCys"
  MOD_RES (5)..(5): Any neutral hydrophilic or basic amino acid residue
  MOD_RES (6)..(6): Any basic or neutral hydrophilic amino acid residue
  VARIANT (7)..(7): /replace="5-bromoTrp" or "6-bromoTrp" or "5-chloroTrp" or "6-chloroTrp" or "1-Nal" or "2-Nal" or "thioTrp" or "BhPhe" or "2-BrhF" or "2-ClhF" or "2-FhF" or "2-MehF" or "2-MeOhF" or "3-BrhF" or "3-ClhF" or "3-FhF" or "3-MehF"
  VARIANT (7)..(7): continued;or "3-MeOhF" or "4-BrhF" or "4-ClhF" or "4-FhF" or "4-Me-F" or "4-MehF" or "4-MeOhF"
  VARIANT (8)..(8): /replace="Nle" or "Nva" or "Leu" or "Ile" or "Val" or "Phe"
  VARIANT (9)..(9): /replace="5-bromoTrp" or "6-bromoTrp" or "5-chloroTrp" or "6-chloroTrp" or "1-Nal" or "2-Nal" or "thioTrp"
  VARIANT (10)..(10): /replace="Any basic or neutral hydrophilic amino acid residue"
  VARIANT (11)..(11): /replace="SeCys"
  MOD_RES (13)..(13): Any amino acid
  VARIANT (14)..(14): /replace="Any basic or acidic residue"
  VARIANT (15)..(15): /replace="Cit"
  MOD_RES (16)..(16): Any amino acid
  VARIANT (17)..(18): /replace="SeCys"
  MOD_RES (19)..(19): Any amino acid
  VARIANT (20)..(20): /replace="Asp" or "Ala"
  VARIANT (22)..(22): /replace="Any acidic, basic, or neutral hydrophilic amino acid residue" or "Val"
  VARIANT (23)..(23): /replace="SeCys"
  VARIANT (24)..(24): /replace="Any basic or neutral hydrophilic amino acid"
  MOD_RES (25)..(25): Any aliphatic hydrophobic residue
  VARIANT (26)..(26): /replace="5-bromoTrp" or "6-bromoTrp" or "5-chloroTrp" or "6-chloroTrp" or "7-BrTrp" or "1-Nal" or "2-Nal" or "thioTrp" or "5-phenylTrp" or "5-iPrTrp" or "5-ethylTrp" or "5-MeTrp"
  VARIANT (27)..(27): /replace="SeCys"
  MOD_RES (28)..(28): Any basic or neutral hydrophilic amino acid residue
  VARIANT (29)..(29): /replace="Any basic amino acid residue" or "Leu"
  VARIANT (30)..(30): /replace="Any acidic, basic or neutral hydrophilic amino acid residue" or "Trp" or "Tyr" or "5-bromoTrp" or "6-bromoTrp" or "5-chloroTrp" or "6-chloroTrp" or "1-Nal" or "2-Nal" or "thioTrp" or "Ala" or "Val"
  VARIANT (31)..(31): /replace="Trp" or "Phe" or "BhPhe" or "Cha" or "Tyr" or "5-bromoTrp" or "6-bromoTrp" or "5-chloroTrp" or "6-chloroTrp" or "1-Nal" or "2-Nal" or "thioTrp" or "4-tBu-F"
  VARIANT (32)..(34): /replace="Independently absent or is independently a hydrophobic or acidic amino acid residue" or "Gly"
  source: /note="C-term optionally amidated
  misc_feature (1)..(34): /note="Variant residues given in the sequence have no preference with respect to those in the annotations for variant positions"
  source: /note="see specification as filed for detailed description of substitutions and preferred embodiments"
XXXCXXWMWACDXARXCCXGLACAXWCXYIISSS

SEQ ID NO: 591 - protein, 34 aa, Artificial Sequence
  source: /note="Description of Artificial Sequence: Synthetic polypeptide"
  MOD_RES (13)..(13): Atz
  source: /note="C-term Amide"
DCLGFFRKCIPDADKCCRPNLVCSRTHKWCKYVF

SEQ ID NO: 592 - protein, 34 aa, Artificial Sequence
  source: /note="Description of Artificial Sequence: Synthetic polypeptide"
  MOD_RES (13)..(13): Atz
  source: /note="C-term Amide"
DCLGAFRKCIPDADKCCRPNLVCSRLHRWCKYVF

SEQ ID NO: 593 - protein, 35 aa, Thrixopelma pruriens
  source: /note="ProTxI"
ECRYWLGGCSAGQTCCKHLVCSRRHGWCVWDGTFS

SEQ ID NO: 594 - protein, 585 aa, Homo sapiens [sequence omitted]

SEQ ID NO: 595 - protein, 30 aa, Artificial Sequence; identical to SEQ ID NO: 296
  source: /note="Description of Artificial Sequence: Synthetic polypeptide"
  source: /note="N-term Amino group"
  MOD_RES (1)..(1): Pra
  MOD_RES (7)..(7): Nle
  source: /note="C-term Amide"

SEQ ID NO: 596 - protein, 30 aa, Artificial Sequence
  source: /note="Description of Artificial Sequence: Synthetic polypeptide"
  source: /note="N-term Amino group"
  MOD_RES (1)..(1): Pra
  MOD_RES (7)..(7): Nle
  source: /note="C-term FreeAcid"
GYCQKWLWTCDSKRACCEGLRCKLWCRKAI

SEQ ID NO: 597 - protein, 30 aa, Artificial Sequence
  source: /note="Description of Artificial Sequence: Synthetic polypeptide"
  source: /note="N-term Amino group"
  MOD_RES (1)..(1): Pra
  MOD_RES (7)..(7): Nle
  source: /note="C-term FreeAcid"
GYCQKWLWTCDSKRACCEGLRCKLWCRKDI

SEQ ID NO: 598 - protein, 30 aa, Artificial Sequence
  source: /note="Description of Artificial Sequence: Synthetic polypeptide"
  source: /note="N-term Amino group"
  MOD_RES (1)..(1): Pra
  MOD_RES (7)..(7): Nle
  source: /note="C-term FreeAcid"
GYCQKWLWTCDSKRACCEGLRCKLWCRKFI

SEQ ID NO: 599 - protein, 30 aa, Artificial Sequence
  source: /note="Description of Artificial Sequence: Synthetic polypeptide"
  source: /note="N-term Amino group"
  MOD_RES (1)..(1): Pra
  MOD_RES (7)..(7): Nle
  source: /note="C-term FreeAcid"
GYCQKWLWTCDSKRACCEGLRCKLWCRKGI

SEQ ID NO: 600 - protein, 30 aa, Artificial Sequence
  source: /note="Description of Artificial Sequence: Synthetic polypeptide"
  source: /note="N-term Amino group"
  MOD_RES (1)..(1): Pra
  MOD_RES (7)..(7): Nle
  source: /note="C-term FreeAcid"
GYCQKWLWTCDSKRACCEGLRCKLWCRKHI

SEQ ID NO: 601 - protein, 30 aa, Artificial Sequence
  source: /note="Description of Artificial Sequence: Synthetic polypeptide"
  source: /note="N-term Amino group"
  MOD_RES (1)..(1): Pra
  MOD_RES (7)..(7): Nle
  source: /note="C-term FreeAcid"
GYCQKWLWTCDSKRACCEGLRCKLWCRKKI

SEQ ID NO: 602 - protein, 30 aa, Artificial Sequence
  source: /note="Description of Artificial Sequence: Synthetic polypeptide"
  source: /note="N-term Amino group"
  MOD_RES (1)..(1): Pra
  MOD_RES (7)..(7): Nle
  source: /note="C-term FreeAcid"
GYCQKWLWTCDSKRACCEGLRCKLWCRKLI

SEQ ID NO: 603 - protein, 30 aa, Artificial Sequence; identical to SEQ ID NO: 602
  source: /note="Description of Artificial Sequence: Synthetic polypeptide"
  source: /note="N-term Amino group"
  MOD_RES (1)..(1): Pra
  MOD_RES (7)..(7): Nle
  MOD_RES (29)..(29): Nle
  source: /note="C-term FreeAcid"

SEQ ID NO: 604 - protein, 30 aa, Artificial Sequence
  source: /note="Description of Artificial Sequence: Synthetic polypeptide"
  source: /note="N-term Amino group"
  MOD_RES (1)..(1): Pra
  MOD_RES (7)..(7): Nle
  source: /note="C-term FreeAcid"
GYCQKWLWTCDSKRACCEGLRCKLWCRKNI

SEQ ID NO: 605 - protein, 30 aa, Artificial Sequence
  source: /note="Description of Artificial Sequence: Synthetic polypeptide"
  source: /note="N-term Amino group"
  MOD_RES (1)..(1): Pra
  MOD_RES (7)..(7): Nle
  source: /note="C-term FreeAcid"
GYCQKWLWTCDSKRACCEGLRCKLWCRKPI

SEQ ID NO: 606 - protein, 30 aa, Artificial Sequence
  source: /note="Description of Artificial Sequence: Synthetic polypeptide"
  source: /note="N-term Amino group"
  MOD_RES (1)..(1): Pra
  MOD_RES (7)..(7): Nle
  source: /note="C-term FreeAcid"
GYCQKWLWTCDSKRACCEGLRCKLWCRKQI

SEQ ID NO: 607 - protein, 30 aa, Artificial Sequence
  source: /note="Description of Artificial Sequence: Synthetic polypeptide"
  source: /note="N-term Amino group"
  MOD_RES (1)..(1): Pra
  MOD_RES (7)..(7): Nle
  source: /note="C-term FreeAcid"
GYCQKWLWTCDSKRACCEGLRCKLWCRKRI

SEQ ID NO: 608 - protein, 30 aa, Artificial Sequence
  source: /note="Description of Artificial Sequence: Synthetic polypeptide"
  source: /note="N-term Amino group"
  MOD_RES (1)..(1): Pra
  MOD_RES (7)..(7): Nle
  source: /note="C-term FreeAcid"
GYCQKWLWTCDSKRACCEGLRCKLWCRKSI

SEQ ID NO: 609 - protein, 30 aa, Artificial Sequence
  source: /note="Description of Artificial Sequence: Synthetic polypeptide"
  source: /note="N-term Amino group"
  MOD_RES (1)..(1): Pra
  MOD_RES (7)..(7): Nle
  source: /note="C-term FreeAcid"
GYCQKWLWTCDSKRACCEGLRCKLWCRKTI

SEQ ID NO: 610 - protein, 30 aa, Artificial Sequence
  source: /note="Description of Artificial Sequence: Synthetic polypeptide"
  source: /note="N-term Amino group"
  MOD_RES (1)..(1): Pra
  MOD_RES (7)..(7): Nle
  source: /note="C-term FreeAcid"
GYCQKWLWTCDSKRACCEGLRCKLWCRKVI

SEQ ID NO: 611 - protein, 30 aa, Artificial Sequence
  source: /note="Description of Artificial Sequence: Synthetic polypeptide"
  source: /note="N-term Amino group"
  MOD_RES (1)..(1): Pra
  MOD_RES (7)..(7): Nle
  source: /note="C-term FreeAcid"
GYCQKWLWTCDSKRACCEGLRCKLWCRKWI

SEQ ID NO: 612 - protein, 30 aa, Artificial Sequence; identical to SEQ ID NO: 596
  source: /note="Description of Artificial Sequence: Synthetic polypeptide"
  source: /note="N-term Amino group"
  MOD_RES (1)..(1): Pra
  MOD_RES (7)..(7): Nle
  MOD_RES (29)..(29): 1-Nal
  source: /note="C-term FreeAcid"

SEQ ID NO: 613 - protein, 30 aa, Artificial Sequence
  source: /note="Description of Artificial Sequence: Synthetic polypeptide"
  source: /note="N-term Amino group"
  MOD_RES (1)..(1): Pra
  MOD_RES (7)..(7): Nle
  source: /note="C-term FreeAcid"
GYCQKWLWTCDSKRACCEGLACKLWCRKII

SEQ ID NO: 614 - protein, 30 aa, Artificial Sequence
  source: /note="Description of Artificial Sequence: Synthetic polypeptide"
  source: /note="N-term Amino group"
  MOD_RES (1)..(1): Pra
  MOD_RES (7)..(7): Nle
  source: /note="C-term FreeAcid"
GYCQKWLWTCDSKRACCEGLDCKLWCRKII

SEQ ID NO: 615 - protein, 30 aa, Artificial Sequence; identical to SEQ ID NO: 297
  source: /note="Description of Artificial Sequence: Synthetic polypeptide"
  source: /note="N-term Amino group"
  MOD_RES (1)..(1): Pra
  MOD_RES (7)..(7): Nle
  source: /note="C-term FreeAcid"

SEQ ID NO: 616 - protein, 30 aa, Artificial Sequence
  source: /note="Description of Artificial Sequence: Synthetic polypeptide"
  source: /note="N-term Amino group"
  MOD_RES (1)..(1): Pra
  MOD_RES (7)..(7): Nle
  source: /note="C-term FreeAcid"
GYCQKWLWTCDSKRACCEGLFCKLWCRKII

SEQ ID NO: 617 - protein, 30 aa, Artificial Sequence
  source: /note="Description of Artificial Sequence: Synthetic polypeptide"
  source: /note="N-term Amino group"
  MOD_RES (1)..(1): Pra
  MOD_RES (7)..(7): Nle
  source: /note="C-term FreeAcid"
GYCQKWLWTCDSKRACCEGLGCKLWCRKII

SEQ ID NO: 618 - protein, 30 aa, Artificial Sequence
  source: /note="Description of Artificial Sequence: Synthetic polypeptide"
  source: /note="N-term Amino group"
  MOD_RES (1)..(1): Pra
  MOD_RES (7)..(7): Nle
  source: /note="C-term FreeAcid"
GYCQKWLWTCDSKRACCEGLHCKLWCRKII

SEQ ID NO: 619 - protein, 30 aa, Artificial Sequence
  source: /note="Description of Artificial Sequence: Synthetic polypeptide"
  source: /note="N-term Amino group"
  MOD_RES (1)..(1): Pra
  MOD_RES (7)..(7): Nle
  source: /note="C-term FreeAcid"
GYCQKWLWTCDSKRACCEGLICKLWCRKII

SEQ ID NO: 620 - protein, 30 aa, Artificial Sequence
  source: /note="Description of Artificial Sequence: Synthetic polypeptide"
  source: /note="N-term Amino group"
  MOD_RES (1)..(1): Pra
  MOD_RES (7)..(7): Nle
  source: /note="C-term FreeAcid"
GYCQKWLWTCDSKRACCEGLKCKLWCRKII

SEQ ID NO: 621 - protein, 30 aa, Artificial Sequence
  source: /note="Description of Artificial Sequence: Synthetic polypeptide"
  source: /note="N-term Amino group"
  MOD_RES (1)..(1): Pra
  MOD_RES (7)..(7): Nle
  source: /note="C-term FreeAcid"
GYCQKWLWTCDSKRACCEGLLCKLWCRKII

SEQ ID NO: 622 - protein, 30 aa, Artificial Sequence; identical to SEQ ID NO: 621
  source: /note="Description of Artificial Sequence: Synthetic polypeptide"
  source: /note="N-term Amino group"
  MOD_RES (1)..(1): Pra
  MOD_RES (7)..(7): Nle
  MOD_RES (21)..(21): Nle
  source: /note="C-term FreeAcid"

SEQ ID NO: 623 - protein, 30 aa, Artificial Sequence
  source: /note="Description of Artificial Sequence: Synthetic polypeptide"
  source: /note="N-term Amino group"
  MOD_RES (1)..(1): Pra
  MOD_RES (7)..(7): Nle
  source: /note="C-term FreeAcid"
GYCQKWLWTCDSKRACCEGLNCKLWCRKII

SEQ ID NO: 624 - protein, 30 aa, Artificial Sequence
  source: /note="Description of Artificial Sequence: Synthetic polypeptide"
  source: /note="N-term Amino group"
  MOD_RES (1)..(1): Pra
  MOD_RES (7)..(7): Nle
  source: /note="C-term FreeAcid"
GYCQKWLWTCDSKRACCEGLPCKLWCRKII

SEQ ID NO: 625 - protein, 30 aa, Artificial Sequence
  source: /note="Description of Artificial Sequence: Synthetic polypeptide"
  source: /note="N-term Amino group"
  MOD_RES (1)..(1): Pra
  MOD_RES (7)..(7): Nle
  source: /note="C-term FreeAcid"
GYCQKWLWTCDSKRACCEGLQCKLWCRKII

SEQ ID NO: 626 - protein, 30 aa, Artificial Sequence
  source: /note="Description of Artificial Sequence: Synthetic polypeptide"
  source: /note="N-term Amino group"
  MOD_RES (1)..(1): Pra
  MOD_RES (7)..(7): Nle
  source: /note="C-term FreeAcid"
GYCQKWLWTCDSKRACCEGLSCKLWCRKII

SEQ ID NO: 627 - protein, 30 aa, Artificial Sequence
  source: /note="Description of Artificial Sequence: Synthetic polypeptide"
  source: /note="N-term Amino group"
  MOD_RES (1)..(1): Pra
  MOD_RES (7)..(7): Nle
  source: /note="C-term FreeAcid"
GYCQKWLWTCDSKRACCEGLTCKLWCRKII

SEQ ID NO: 628 - protein, 30 aa, Artificial Sequence
  source: /note="Description of Artificial Sequence: Synthetic polypeptide"
  source: /note="N-term Amino group"
  MOD_RES (1)..(1): Pra
  MOD_RES (7)..(7): Nle
  source: /note="C-term FreeAcid"
GYCQKWLWTCDSKRACCEGLVCKLWCRKII

SEQ ID NO: 629 - protein, 30 aa, Artificial Sequence
  source: /note="Description of Artificial Sequence: Synthetic polypeptide"
  source: /note="N-term Amino group"
  MOD_RES (1)..(1): Pra
  MOD_RES (7)..(7): Nle
  source: /note="C-term FreeAcid"
GYCQKWLWTCDSKRACCEGLWCKLWCRKII

SEQ ID NO: 630 - protein, 30 aa, Artificial Sequence
  source: /note="Description of Artificial Sequence: Synthetic polypeptide"
  source: /note="N-term Amino group"
  MOD_RES (1)..(1): Pra
  MOD_RES (7)..(7): Nle
  source: /note="C-term FreeAcid"
GYCQKWLWTCDSKRACCEGLYCKLWCRKII

SEQ ID NO: 631 - protein, 30 aa, Artificial Sequence; identical to SEQ ID NO: 613
  source: /note="Description of Artificial Sequence: Synthetic polypeptide"
  source: /note="N-term Amino group"
  MOD_RES (1)..(1): Pra
  MOD_RES (7)..(7): Nle
  MOD_RES (21)..(21): 1-Nal
  source: /note="C-term FreeAcid"

SEQ ID NO: 632 - protein, 30 aa, Artificial Sequence
  source: /note="Description of Artificial Sequence: Synthetic polypeptide"
  source: /note="N-term Amino group"
  MOD_RES (1)..(1): Pra
  MOD_RES (7)..(7): Nle
  source: /note="C-term FreeAcid"
GYCQKWLWTCDSKRACCEGLDCKLWCRKEI

SEQ ID NO: 633 - protein, 30 aa, Artificial Sequence
  source: /note="Description of Artificial Sequence: Synthetic polypeptide"
  source: /note="N-term Amino group"
  MOD_RES (1)..(1): Pra
  MOD_RES (7)..(7): Nle
  source: /note="C-term FreeAcid"
GYCQKWLWTCDSKRACCEGLECKLWCRKEI

SEQ ID NO: 634 - protein, 30 aa, Artificial Sequence
  source: /note="Description of Artificial Sequence: Synthetic polypeptide"
  source: /note="N-term Amino group"
  MOD_RES (1)..(1): Pra
  MOD_RES (7)..(7): Nle
  source: /note="C-term FreeAcid"
GYCQKWLWTCDSKRACCEGLFCKLWCRKEI

SEQ ID NO: 635 - protein, 30 aa, Artificial Sequence
  source: /note="Description of Artificial Sequence: Synthetic polypeptide"
  source: /note="N-term Amino group"
  MOD_RES (1)..(1): Pra
  MOD_RES (7)..(7): Nle
  source: /note="C-term FreeAcid"
GYCQKWLWTCDSKRACCEGLGCKLWCRKEI

SEQ ID NO: 636 - protein, 30 aa, Artificial Sequence
  source: /note="Description of Artificial Sequence: Synthetic polypeptide"
  source: /note="N-term Amino group"
  MOD_RES (1)..(1): Pra
  MOD_RES (7)..(7): Nle
  source: /note="C-term FreeAcid"
GYCQKWLWTCDSKRACCEGLHCKLWCRKEI

SEQ ID NO: 637 - protein, 30 aa, Artificial Sequence
  source: /note="Description of Artificial Sequence: Synthetic polypeptide"
  source: /note="N-term Amino group"
  MOD_RES (1)..(1): Pra
  MOD_RES (7)..(7): Nle
  source: /note="C-term FreeAcid"
GYCQKWLWTCDSKRACCEGLICKLWCRKEI

SEQ ID NO: 638 - protein, 30 aa, Artificial Sequence
  source: /note="Description of Artificial Sequence: Synthetic polypeptide"
  source: /note="N-term Amino group"
  MOD_RES (1)..(1): Pra
  MOD_RES (7)..(7): Nle
  source: /note="C-term FreeAcid"
GYCQKWLWTCDSKRACCEGLLCKLWCRKEI

SEQ ID NO: 639 - protein, 30 aa, Artificial Sequence; identical to SEQ ID NO: 638
  source: /note="Description of Artificial Sequence: Synthetic polypeptide"
  source: /note="N-term Amino group"
  MOD_RES (1)..(1): Pra
  MOD_RES (7)..(7): Nle
  MOD_RES (21)..(21): Nle
  source: /note="C-term FreeAcid"

SEQ ID NO: 640 - protein, 30 aa, Artificial Sequence
  source: /note="Description of Artificial Sequence: Synthetic polypeptide"
  source: /note="N-term Amino group"
  MOD_RES (1)..(1): Pra
  MOD_RES (7)..(7): Nle
  source: /note="C-term FreeAcid"
GYCQKWLWTCDSKRACCEGLNCKLWCRKEI

SEQ ID NO: 641 - protein, 30 aa, Artificial Sequence
  source: /note="Description of Artificial Sequence: Synthetic polypeptide"
  source: /note="N-term Amino group"
  MOD_RES (1)..(1): Pra
  MOD_RES (7)..(7): Nle
  source: /note="C-term FreeAcid"
GYCQKWLWTCDSKRACCEGLPCKLWCRKEI

SEQ ID NO: 642 - protein, 30 aa, Artificial Sequence
  source: /note="Description of Artificial Sequence: Synthetic polypeptide"
  source: /note="N-term Amino group"
  MOD_RES (1)..(1): Pra
  MOD_RES (7)..(7): Nle
  source: /note="C-term FreeAcid"
GYCQKWLWTCDSKRACCEGLQCKLWCRKEI

SEQ ID NO: 643 - protein, 30 aa, Artificial Sequence
  source: /note="Description of Artificial Sequence: Synthetic polypeptide"
  source: /note="N-term Amino group"
  MOD_RES (1)..(1): Pra
  MOD_RES (7)..(7): Nle
  source: /note="C-term FreeAcid"
GYCQKWLWTCDSKRACCEGLSCKLWCRKEI

SEQ ID NO: 644 - protein, 30 aa, Artificial Sequence
  source: /note="Description of Artificial Sequence: Synthetic polypeptide"
  source: /note="N-term Amino group"
  MOD_RES (1)..(1): Pra
  MOD_RES (7)..(7): Nle
  source: /note="C-term FreeAcid"
GYCQKWLWTCDSKRACCEGLTCKLWCRKEI

SEQ ID NO: 645 - protein, 30 aa, Artificial Sequence
  source: /note="Description of Artificial Sequence: Synthetic polypeptide"
  source: /note="N-term Amino group"
  MOD_RES (1)..(1): Pra
  MOD_RES (7)..(7): Nle
  source: /note="C-term FreeAcid"
GYCQKWLWTCDSKRACCEGLVCKLWCRKEI

SEQ ID NO: 646 - protein, 30 aa, Artificial Sequence
  source: /note="Description of Artificial Sequence: Synthetic polypeptide"
  source: /note="N-term Amino group"
  MOD_RES (1)..(1): Pra
  MOD_RES (7)..(7): Nle
  source: /note="C-term FreeAcid"
GYCQKWLWTCDSKRACCEGLWCKLWCRKEI

SEQ ID NO: 647 - protein, 30 aa, Artificial Sequence
  source: /note="Description of Artificial Sequence: Synthetic polypeptide"
  source: /note="N-term Amino group"
  MOD_RES (1)..(1): Pra
  MOD_RES (7)..(7): Nle
  source: /note="C-term FreeAcid"
GYCQKWLWTCDSKRACCEGLYCKLWCRKEI

SEQ ID NO: 648 - protein, 30 aa, Artificial Sequence
  source: /note="Description of Artificial Sequence: Synthetic polypeptide"
  source: /note="N-term Amino group"
  MOD_RES (1)..(1): Pra
  MOD_RES (7)..(7): Nle
  MOD_RES (21)..(21): 1-Nal
  source: /note="C-term FreeAcid"
GYCQKWLWTCDSKRACCEGLACKLWCRKEI

SEQ ID NO: 649 - protein, 30 aa, Artificial Sequence; identical to SEQ ID NO: 596
  source: /note="Description of Artificial Sequence: Synthetic polypeptide"
  source: /note="N-term Amino group"
  MOD_RES (1)..(1): Pra
  MOD_RES (7)..(7): Nle
  source: /note="C-term Amide"

SEQ ID NO: 650 - protein, 30 aa, Artificial Sequence; identical to SEQ ID NO: 598
  source: /note="Description of Artificial Sequence: Synthetic polypeptide"
  source: /note="N-term Amino group"
  MOD_RES (1)..(1): Pra
  MOD_RES (7)..(7): Nle
  source: /note="C-term Amide"

SEQ ID NO: 651 - protein, 30 aa, Artificial Sequence; identical to SEQ ID NO: 599
  source: /note="Description of Artificial Sequence: Synthetic polypeptide"
  source: /note="N-term Amino group"
  MOD_RES (1)..(1): Pra
  MOD_RES (7)..(7): Nle
  source: /note="C-term Amide"

SEQ ID NO: 652 - protein, 30 aa, Artificial Sequence; identical to SEQ ID NO: 600
  source: /note="Description of Artificial Sequence: Synthetic polypeptide"
  source: /note="N-term Amino group"
  MOD_RES (1)..(1): Pra
  MOD_RES (7)..(7): Nle
  source: /note="C-term Amide"

SEQ ID NO: 653 - protein, 30 aa, Artificial Sequence
  source: /note="Description of Artificial Sequence: Synthetic polypeptide"
  source: /note="N-term Amino group"
  MOD_RES (1)..(1): Pra
  MOD_RES (7)..(7): Nle
  source: /note="C-term Amide"
GYCQKWLWTCDSKRACCEGLRCKLWCRKYI

SEQ ID NO: 654 - protein, 30 aa, Artificial Sequence; identical to SEQ ID NO: 601
  source: /note="Description of Artificial Sequence: Synthetic polypeptide"
  source: /note="N-term Amino group"
  MOD_RES (1)..(1): Pra
  MOD_RES (7)..(7): Nle
  source: /note="C-term Amide"

SEQ ID NO: 655 - protein, 30 aa, Artificial Sequence; identical to SEQ ID NO: 602
  source: /note="Description of Artificial Sequence: Synthetic polypeptide"
  source: /note="N-term Amino group"
  MOD_RES (1)..(1): Pra
  MOD_RES (7)..(7): Nle
  source: /note="C-term Amide"

SEQ ID NO: 656 - protein, 30 aa, Artificial Sequence; identical to SEQ ID NO: 604
  source: /note="Description of Artificial Sequence: Synthetic polypeptide"
  source: /note="N-term Amino group"
  MOD_RES (1)..(1): Pra
  MOD_RES (7)..(7): Nle
  source: /note="C-term Amide"

SEQ ID NO: 657 - protein, 30 aa, Artificial Sequence; identical to SEQ ID NO: 605
  source: /note="Description of Artificial Sequence: Synthetic polypeptide"
  source: /note="N-term Amino group"
  MOD_RES (1)..(1): Pra
  MOD_RES (7)..(7): Nle
  source: /note="C-term Amide"

SEQ ID NO: 658 - protein, 30 aa, Artificial Sequence; identical to SEQ ID NO: 607
  source: /note="Description of Artificial Sequence: Synthetic polypeptide"
  source: /note="N-term Amino group"
  MOD_RES (1)..(1): Pra
  MOD_RES (7)..(7): Nle
  source: /note="C-term Amide"

SEQ ID NO: 659 - protein, 30 aa, Artificial Sequence; identical to SEQ ID NO: 608
  source: /note="Description of Artificial Sequence: Synthetic polypeptide"
  source: /note="N-term Amino group"
  MOD_RES (1)..(1): Pra
  MOD_RES (7)..(7): Nle
  source: /note="C-term Amide"

SEQ ID NO: 660 - protein, 30 aa, Artificial Sequence; identical to SEQ ID NO: 609
  source: /note="Description of Artificial Sequence: Synthetic polypeptide"
  source: /note="N-term Amino group"
  MOD_RES (1)..(1): Pra
  MOD_RES (7)..(7): Nle
  source: /note="C-term Amide"

SEQ ID NO: 661 - protein, 30 aa, Artificial Sequence; identical to SEQ ID NO: 610
  source: /note="Description of Artificial Sequence: Synthetic polypeptide"
  source: /note="N-term Amino group"
  MOD_RES (1)..(1): Pra
  MOD_RES (7)..(7): Nle
  source: /note="C-term Amide"

SEQ ID NO: 662 - protein, 30 aa, Artificial Sequence; identical to SEQ ID NO: 611
  source: /note="Description of Artificial Sequence: Synthetic polypeptide"
  source: /note="N-term Amino group"
  MOD_RES (1)..(1): Pra
  MOD_RES (7)..(7): Nle
  source: /note="C-term Amide"

SEQ ID NO: 663 - protein, 30 aa, Artificial Sequence; identical to SEQ ID NO: 596
  source: /note="Description of Artificial Sequence: Synthetic polypeptide"
  source: /note="N-term Amino group"
  MOD_RES (1)..(1): Pra
  MOD_RES (7)..(7): Nle
  MOD_RES (29)..(29): 1-Nal
  source: /note="C-term Amide"

SEQ ID NO: 664 - protein, 30 aa, Artificial Sequence; identical to SEQ ID NO: 602
  source: /note="Description of Artificial Sequence: Synthetic polypeptide"
  source: /note="N-term Amino group"
  MOD_RES (1)..(1): Pra
  MOD_RES (7)..(7): Nle
  MOD_RES (29)..(29): Nle
  source: /note="C-term Amide"

SEQ ID NO: 665 - protein, 30 aa, Artificial Sequence; identical to SEQ ID NO: 606
  source: /note="Description of Artificial Sequence: Synthetic polypeptide"
  source: /note="N-term Amino group"
  MOD_RES (1)..(1): Pra
  MOD_RES (7)..(7): Nle
  source: /note="C-term Amide"

SEQ ID NO: 666 - protein, 30 aa, Artificial Sequence; identical to SEQ ID NO: 613
  source: /note="Description of Artificial Sequence: Synthetic polypeptide"
  source: /note="N-term Amino group"
  MOD_RES (1)..(1): Pra
  MOD_RES (7)..(7): Nle
  source: /note="C-term Amide"

SEQ ID NO: 667 - protein, 30 aa, Artificial Sequence; identical to SEQ ID NO: 614
  source: /note="Description of Artificial Sequence: Synthetic polypeptide"
  source: /note="N-term Amino group"
  MOD_RES (1)..(1): Pra
  MOD_RES (7)..(7): Nle
  source: /note="C-term Amide"

SEQ ID NO: 668 - protein, 30 aa, Artificial Sequence; identical to SEQ ID NO: 616
  source: /note="Description of Artificial Sequence: Synthetic polypeptide"
  source: /note="N-term Amino group"
  MOD_RES (1)..(1): Pra
  MOD_RES (7)..(7): Nle
  source: /note="C-term Amide"

SEQ ID NO: 669 - protein, 30 aa, Artificial Sequence; identical to SEQ ID NO: 617
  source: /note="Description of Artificial Sequence: Synthetic polypeptide"
  source: /note="N-term Amino group"
  MOD_RES (1)..(1): Pra
  MOD_RES (7)..(7): Nle
  source: /note="C-term Amide"

SEQ ID NO: 670 - protein, 30 aa, Artificial Sequence; identical to SEQ ID NO: 618
  source: /note="Description of Artificial Sequence: Synthetic polypeptide"
  source: /note="N-term Amino group"
  MOD_RES (1)..(1): Pra
  MOD_RES (7)..(7): Nle
  source: /note="C-term Amide"

SEQ ID NO: 671 - protein, 30 aa, Artificial Sequence; identical to SEQ ID NO: 619
  source: /note="Description of Artificial Sequence: Synthetic polypeptide"
  source: /note="N-term Amino group"
  MOD_RES (1)..(1): Pra
  MOD_RES (7)..(7): Nle
  source: /note="C-term Amide"

SEQ ID NO: 672 - protein, 30 aa, Artificial Sequence; identical to SEQ ID NO: 620
  source: /note="Description of Artificial Sequence: Synthetic polypeptide"
  source: /note="N-term Amino group"
  MOD_RES (1)..(1): Pra
  MOD_RES (7)..(7): Nle
  source: /note="C-term Amide"

SEQ ID NO: 673 - protein, 30 aa, Artificial Sequence; identical to SEQ ID NO: 621
  source: /note="Description of Artificial Sequence: Synthetic polypeptide"
  source: /note="N-term Amino group"
  MOD_RES (1)..(1): Pra
  MOD_RES (7)..(7): Nle
  source: /note="C-term Amide"

SEQ ID NO: 674 - protein, 30 aa, Artificial Sequence; identical to SEQ ID NO: 621
  source: /note="Description of Artificial Sequence: Synthetic polypeptide"
  source: /note="N-term Amino group"
  MOD_RES (1)..(1): Pra
  MOD_RES (7)..(7): Nle
  MOD_RES (21)..(21): Nle
  source: /note="C-term Amide"

SEQ ID NO: 675 - protein, 30 aa, Artificial Sequence; identical to SEQ ID NO: 623
  source: /note="Description of Artificial Sequence: Synthetic polypeptide"
  source: /note="N-term Amino group"
  MOD_RES (1)..(1): Pra
  MOD_RES (7)..(7): Nle
  source: /note="C-term Amide"

SEQ ID NO: 676 - protein, 30 aa, Artificial Sequence; identical to SEQ ID NO: 624
  source: /note="Description of Artificial Sequence: Synthetic polypeptide"
  source: /note="N-term Amino group"
  MOD_RES (1)..(1): Pra
  MOD_RES (7)..(7): Nle
  source: /note="C-term Amide"

SEQ ID NO: 677 - protein, 30 aa, Artificial Sequence; identical to SEQ ID NO: 625
  source: /note="Description of Artificial Sequence: Synthetic polypeptide"
  source: /note="N-term Amino group"
  MOD_RES (1)..(1): Pra
  MOD_RES (7)..(7): Nle
  source: /note="C-term Amide"

SEQ ID NO: 678 - protein, 30 aa, Artificial Sequence; identical to SEQ ID NO: 626
  source: /note="Description of Artificial Sequence: Synthetic polypeptide"
  source: /note="N-term Amino group"
  MOD_RES (1)..(1): Pra
  MOD_RES (7)..(7): Nle
  source: /note="C-term Amide"

SEQ ID NO: 679 - protein, 30 aa, Artificial Sequence; identical to SEQ ID NO: 627
  source: /note="Description of Artificial Sequence: Synthetic polypeptide"
  source: /note="N-term Amino group"
  MOD_RES (1)..(1): Pra
  MOD_RES (7)..(7): Nle
  source: /note="C-term Amide"

SEQ ID NO: 680 - protein, 30 aa, Artificial Sequence; identical to SEQ ID NO: 628
  source: /note="Description of Artificial Sequence: Synthetic polypeptide"
  source: /note="N-term Amino group"
  MOD_RES (1)..(1): Pra
  MOD_RES (7)..(7): Nle
  source: /note="C-term Amide"

SEQ ID NO: 681 - protein, 30 aa, Artificial Sequence; identical to SEQ ID NO: 629
  source: /note="Description of Artificial Sequence: Synthetic polypeptide"
  source: /note="N-term Amino group"
  MOD_RES (1)..(1): Pra
  MOD_RES (7)..(7): Nle
  source: /note="C-term Amide"

SEQ ID NO: 682 - protein, 30 aa, Artificial Sequence; identical to SEQ ID NO: 630
  source: /note="Description of Artificial Sequence: Synthetic polypeptide"
  source: /note="N-term Amino group"
  MOD_RES (1)..(1): Pra
  MOD_RES (7)..(7): Nle
  source: /note="C-term Amide"

SEQ ID NO: 683 - protein, 30 aa, Artificial Sequence; identical to SEQ ID NO: 613
  source: /note="Description of Artificial Sequence: Synthetic polypeptide"
  source: /note="N-term Amino group"
  MOD_RES (1)..(1): Pra
  MOD_RES (7)..(7): Nle
  MOD_RES (21)..(21): 1-Nal
  source: /note="C-term Amide"

SEQ ID NO: 684 - protein, 30 aa, Artificial Sequence; identical to SEQ ID NO: 632
  source: /note="Description of Artificial Sequence: Synthetic polypeptide"
  source: /note="N-term Amino group"
  MOD_RES (1)..(1): Pra
  MOD_RES (7)..(7): Nle
  source: /note="C-term Amide"

SEQ ID NO: 685 - protein, 30 aa, Artificial Sequence; identical to SEQ ID NO: 633
  source: /note="Description of Artificial Sequence: Synthetic polypeptide"
  source: /note="N-term Amino group"
  MOD_RES (1)..(1): Pra
  MOD_RES (7)..(7): Nle
  source: /note="C-term Amide"

SEQ ID NO: 686 - protein, 30 aa, Artificial Sequence; identical to SEQ ID NO: 634
  source: /note="Description of Artificial Sequence: Synthetic polypeptide"
  source: /note="N-term Amino group"
  MOD_RES (1)..(1): Pra
  MOD_RES (7)..(7): Nle
  source: /note="C-term Amide"

SEQ ID NO: 687 - protein, 30 aa, Artificial Sequence; identical to SEQ ID NO: 635
  source: /note="Description of Artificial Sequence: Synthetic polypeptide"
  source: /note="N-term Amino group"
  MOD_RES (1)..(1): Pra
  MOD_RES (7)..(7): Nle
  source: /note="C-term Amide"

SEQ ID NO: 688 - protein, 30 aa, Artificial Sequence; identical to SEQ ID NO: 636
  source: /note="Description of Artificial Sequence: Synthetic polypeptide"
  source: /note="N-term Amino group"
  MOD_RES (1)..(1): Pra
  MOD_RES (7)..(7): Nle
  source: /note="C-term Amide"

SEQ ID NO: 689 - protein, 30 aa, Artificial Sequence; identical to SEQ ID NO: 637
  source: /note="Description of Artificial Sequence: Synthetic polypeptide"
  source: /note="N-term Amino group"
  MOD_RES (1)..(1): Pra
  MOD_RES (7)..(7): Nle
  source: /note="C-term Amide"

SEQ ID NO: 690 - protein, 30 aa, Artificial Sequence; identical to SEQ ID NO: 638
  source: /note="Description of Artificial Sequence: Synthetic polypeptide"
  source: /note="N-term Amino group"
  MOD_RES (1)..(1): Pra
  MOD_RES (7)..(7): Nle
  source: /note="C-term Amide"

SEQ ID NO: 691 - protein, 30 aa, Artificial Sequence; identical to SEQ ID NO: 638
  source: /note="Description of Artificial Sequence: Synthetic polypeptide"
  source: /note="N-term Amino group"
  MOD_RES (1)..(1): Pra
  MOD_RES (7)..(7): Nle
  MOD_RES (21)..(21): Nle
  source: /note="C-term Amide"

SEQ ID NO: 692 - protein, 30 aa, Artificial Sequence; identical to SEQ ID NO: 640
  source: /note="Description of Artificial Sequence: Synthetic polypeptide"
  source: /note="N-term Amino group"
  MOD_RES (1)..(1): Pra
  MOD_RES (7)..(7): Nle
  source: /note="C-term Amide"

SEQ ID NO: 693 - protein, 30 aa, Artificial Sequence; identical to SEQ ID NO: 641
  source: /note="Description of Artificial Sequence: Synthetic polypeptide"
  source: /note="N-term Amino group"
  MOD_RES (1)..(1): Pra
  MOD_RES (7)..(7): Nle
  source: /note="C-term Amide"

SEQ ID NO: 694 - protein, 30 aa, Artificial Sequence; identical to SEQ ID NO: 642
  source: /note="Description of Artificial Sequence: Synthetic polypeptide"
  source: /note="N-term Amino group"
  MOD_RES (1)..(1): Pra
  MOD_RES (7)..(7): Nle
  source: /note="C-term Amide"

SEQ ID NO: 695 - protein, 30 aa, Artificial Sequence; identical to SEQ ID NO: 643
  source: /note="Description of Artificial Sequence: Synthetic polypeptide"
  source: /note="N-term Amino group"
  MOD_RES (1)..(1): Pra
  MOD_RES (7)..(7): Nle
  source: /note="C-term Amide"

SEQ ID NO: 696 - protein, 30 aa, Artificial Sequence; identical to SEQ ID NO: 644
  source: /note="Description of Artificial Sequence: Synthetic polypeptide"
  source: /note="N-term Amino group"
  MOD_RES (1)..(1): Pra
  MOD_RES (7)..(7): Nle
  source: /note="C-term Amide"

SEQ ID NO: 697 - protein, 30 aa, Artificial Sequence; identical to SEQ ID NO: 645
  source: /note="Description of Artificial Sequence: Synthetic polypeptide"
  source: /note="N-term Amino group"
  MOD_RES (1)..(1): Pra
  MOD_RES (7)..(7): Nle
  source: /note="C-term Amide"

SEQ ID NO: 698 - protein, 30 aa, Artificial Sequence; identical to SEQ ID NO: 646
  source: /note="Description of Artificial Sequence: Synthetic polypeptide"
  source: /note="N-term Amino group"
  MOD_RES (1)..(1): Pra
  MOD_RES (7)..(7): Nle
  source: /note="C-term Amide"

SEQ ID NO: 699 - protein, 30 aa, Artificial Sequence; identical to SEQ ID NO: 647
  source: /note="Description of Artificial Sequence: Synthetic polypeptide"
  source: /note="N-term Amino group"
  MOD_RES (1)..(1): Pra
  MOD_RES (7)..(7): Nle
  source: /note="C-term Amide"

SEQ ID NO: 700 - protein, 30 aa, Artificial Sequence; identical to SEQ ID NO: 648
  source: /note="Description of Artificial Sequence: Synthetic polypeptide"
  source: /note="N-term Amino group"
  MOD_RES (1)..(1): Pra
  MOD_RES (7)..(7): Nle
  MOD_RES (21)..(21): 1-Nal
  source: /note="C-term Amide"

SEQ ID NO: 701 - protein, 29 aa, Artificial Sequence
  source: /note="Description of Artificial Sequence: Synthetic peptide"
  source: /note="N-term Amino group"
  MOD_RES (1)..(1): Y3-I
  MOD_RES (6)..(6): Nle
  source: /note="C-term Amide"
ICQKWLWTCDSKRACCEGLRCKLWCRKEI

SEQ ID NO: 702 - protein, 29 aa, Artificial Sequence
  source: /note="Description of Artificial Sequence: Synthetic peptide"
  source: /note="N-term Amino group"
  MOD_RES (1)..(1): Y3-I
  MOD_RES (6)..(6): Nle
  MOD_RES (7)..(7): 1-Nal
  MOD_RES (24)..(24): 1-Nal
  source: /note="C-term Amide"
ICQKWLATCDSKRACCEGLRCKLACRKEI

SEQ ID NO: 703 - protein, 30 aa, Artificial Sequence
  source: /note="Description of Artificial Sequence: Synthetic polypeptide"
  source: /note="N-term Amino group"
  MOD_RES (1)..(1): Pra
  MOD_RES (7)..(7): Nle
  source: /note="C-term Amide"
GYCQKWLWTCDSKRACCEGARCKLWCRKEI

SEQ ID NO: 704 - protein, 30 aa, Artificial Sequence
  source: /note="Description of Artificial Sequence: Synthetic polypeptide"
  source: /note="N-term Amino group"
  MOD_RES (1)..(1): Pra
  MOD_RES (7)..(7): Nle
  source: /note="C-term Amide"
GYCQKWLWTCDSKRACCEGKRCKLWCRKEI

SEQ ID NO: 705 - protein, 30 aa, Artificial Sequence
  source: /note="Description of Artificial Sequence: Synthetic polypeptide"
  source: /note="N-term Amino group"
  MOD_RES (1)..(1): Pra
  MOD_RES (7)..(7): Nle
  source: /note="C-term Amide"
GYCQKWLWTCDSKRACCEGRRCKLWCRKEI

SEQ ID NO: 706 - protein, 30 aa, Artificial Sequence; identical to SEQ ID NO: 703
  source: /note="Description of Artificial Sequence: Synthetic polypeptide"
  source: /note="N-term Amino group"
  MOD_RES (1)..(1): Pra
  MOD_RES (7)..(7): Nle
  MOD_RES (20)..(20): 1-Nal
  source: /note="C-term Amide"

SEQ ID NO: 707 - protein, 31 aa, Artificial Sequence
  source: /note="Description of Artificial Sequence: Synthetic polypeptide"
  source: /note="N-term Amino group"
  MOD_RES (2)..(2): Pra
  MOD_RES (8)..(8): Nle
  source: /note="C-term Amide"
EGYCQKWLWTCDSKRACCEGLRCKLWCRKEI

SEQ ID NO: 708 - protein, 30 aa, Artificial Sequence
  source: /note="Description of Artificial Sequence: Synthetic polypeptide"
  source: /note="N-term Amino group"
  MOD_RES (7)..(7): Nle
  source: /note="C-term Amide"
EYCQKWLWTCDSKRACCEGLRCKLWCRKEI

SEQ ID NO: 709 - protein, 30 aa, Artificial Sequence
  source: /note="Description of Artificial Sequence: Synthetic polypeptide"
  source: /note="N-term Amino group"
  MOD_RES (1)..(1): Pra
  MOD_RES (7)..(7): Nle
  source: /note="C-term Amide"
GECQKWLWTCDSKRACCEGLRCKLWCRKEI

SEQ ID NO: 710 - protein, 30 aa, Artificial Sequence
  source: /note="Description of Artificial Sequence: Synthetic polypeptide"
  source: /note="N-term Amino group"
  MOD_RES (1)..(1): Pra
  MOD_RES (7)..(7): Nle
  source: /note="C-term Amide"
GYCEKWLWTCDSKRACCEGLRCKLWCRKEI

SEQ ID NO: 711 - protein, 30 aa, Artificial Sequence
  source: /note="Description of Artificial Sequence: Synthetic polypeptide"
  source: /note="N-term Amino group"
  MOD_RES (1)..(1): Pra
  MOD_RES (7)..(7): Nle
  source: /note="C-term Amide"
GYCQEWLWTCDSKRACCEGLRCKLWCRKEI

SEQ ID NO: 712 - protein, 30 aa, Artificial Sequence
  source: /note="Description of Artificial Sequence: Synthetic polypeptide"
  source: /note="N-term Amino group"
  MOD_RES (1)..(1): Pra
  MOD_RES (7)..(7): Nle
  source: /note="C-term Amide"
GYCQKWLWECDSKRACCEGLRCKLWCRKEI

SEQ ID NO: 713 - protein, 30 aa, Artificial Sequence
  source: /note="Description of Artificial Sequence: Synthetic polypeptide"
  source: /note="N-term Amino group"
  MOD_RES (1)..(1): Pra
  MOD_RES (7)..(7): Nle
  source: /note="C-term Amide"
GYCQKWLWTCESKRACCEGLRCKLWCRKEI

SEQ ID NO: 714 - protein, 30 aa, Artificial Sequence
  source: /note="Description of Artificial Sequence: Synthetic polypeptide"
  source: /note="N-term Amino group"
  MOD_RES (1)..(1): Pra
  MOD_RES (7)..(7): Nle
  source: /note="C-term Amide"
GYCQKWLWTCDEKRACCEGLRCKLWCRKEI

SEQ ID NO: 715 - protein, 30 aa, Artificial Sequence
  source: /note="Description of Artificial Sequence: Synthetic polypeptide"
  source: /note="N-term Amino group"
  MOD_RES (1)..(1): Pra
  MOD_RES (7)..(7): Nle
  source: /note="C-term Amide"
GYCQKWLWTCDSERACCEGLRCKLWCRKEI

SEQ ID NO: 716 - protein, 30 aa, Artificial Sequence
  source: /note="Description of Artificial Sequence: Synthetic polypeptide"
  source: /note="N-term Amino group"
  MOD_RES (1)..(1): Pra
  MOD_RES (7)..(7): Nle
  source: /note="C-term Amide"
GYCQKWLWTCDSKEACCEGLRCKLWCRKEI

SEQ ID NO: 717 - protein, 30 aa, Artificial Sequence
  source: /note="Description of Artificial Sequence: Synthetic polypeptide"
  source: /note="N-term Amino group"
  MOD_RES (1)..(1): Pra
  MOD_RES (7)..(7): Nle
  source: /note="C-term Amide"
GYCQKWLWTCDSKRECCEGLRCKLWCRKEI

SEQ ID NO: 718 - protein, 30 aa, Artificial Sequence
  source: /note="Description of Artificial Sequence: Synthetic polypeptide"
  source: /note="N-term Amino group"
  MOD_RES (1)..(1): Pra
  MOD_RES (7)..(7): Nle
  source: /note="C-term Amide"
GYCQKWLWTCDSKRACCKGLRCKLWCRKEI

SEQ ID NO: 719 - protein, 30 aa, Artificial Sequence
  source: /note="Description of Artificial Sequence: Synthetic polypeptide"
  source: /note="N-term Amino group"
  MOD_RES (1)..(1): Pra
  MOD_RES (7)..(7): Nle
  source: /note="C-term Amide"
GYCQKWLWTCDSKRACCEELRCKLWCRKEI

SEQ ID NO: 720 - protein, 30 aa, Artificial Sequence
  source: /note="Description of Artificial Sequence: Synthetic polypeptide"
  source: /note="N-term Amino group"
  MOD_RES (1)..(1): Pra
  MOD_RES (7)..(7): Nle
  source: /note="C-term Amide"
GYCQKWLWTCDSKRACCEGERCKLWCRKEI

SEQ ID NO: 721 - protein, 30 aa, Artificial Sequence
  source: /note="Description of Artificial Sequence: Synthetic polypeptide"
  source: /note="N-term Amino group"
  MOD_RES (1)..(1): Pra
  MOD_RES (7)..(7): Nle
  source: /note="C-term Amide"
GYCQKWLWTCDSKRACCEGLKCKLWCRKEI

SEQ ID NO: 722 - protein, 30 aa, Artificial Sequence
  source: /note="Description of Artificial Sequence: Synthetic polypeptide"
  source: /note="N-term Amino group"
  MOD_RES (1)..(1): Pra
  MOD_RES (7)..(7): Nle
  source: /note="C-term Amide"
GYCQKWLWTCDSKRACCEGLRCELWCRKEI

SEQ ID NO: 723 - protein, 30 aa, Artificial Sequence; identical to SEQ ID NO: 597
  source: /note="Description of Artificial Sequence: Synthetic polypeptide"
  source: /note="N-term Amino group"
  MOD_RES (1)..(1): Pra
  MOD_RES (7)..(7): Nle
  source: /note="C-term Amide"

SEQ ID NO: 724 - protein, 30 aa, Artificial Sequence
  source: /note="Description of Artificial Sequence: Synthetic polypeptide"
  source: /note="N-term Amino group"
  MOD_RES (1)..(1): Pra
  MOD_RES (7)..(7): Nle
  source: /note="C-term Amide"
GYCQKWLWTCDSKRACCEGLRCKLWCEKEI

SEQ ID NO: 725 - protein, 30 aa, Artificial Sequence
  source: /note="Description of Artificial Sequence: Synthetic polypeptide"
  source: /note="N-term Amino group"
  MOD_RES (1)..(1): Pra
  MOD_RES (7)..(7): Nle
  source: /note="C-term Amide"
GYCQKWLWTCDSKRACCEGLRCKLWCREEI

SEQ ID NO: 726 - protein, 31 aa, Artificial Sequence
  source: /note="Description of Artificial Sequence: Synthetic polypeptide"
  source: /note="N-term Amino group"
  MOD_RES (1)..(1): Pra
  MOD_RES (7)..(7): Nle
  source: /note="C-term Amide"
GYCQKWLWTCDSKRACCEGLRCKLWCRKEIE

SEQ ID NO: 727 - protein, 30 aa, Artificial Sequence; identical to SEQ ID NO: 648
  source: /note="Description of Artificial Sequence: Synthetic polypeptide"
  source: /note="N-term Amino group"
  MOD_RES (1)..(1): Pra
  MOD_RES (7)..(7): Nle
  source: /note="C-term Amide"

SEQ ID NO: 728 - protein, 30 aa, Artificial Sequence
  source: /note="Description of Artificial Sequence: Synthetic polypeptide"
  source: /note="N-term Amino group"
  MOD_RES (1)..(1): Pra
  MOD_RES (7)..(7): Nle
  source: /note="C-term Amide"
GYCQKWLWTCDSERACCKGLRCKLWCRKEI

SEQ ID NO: 729 - protein, 30 aa, Artificial Sequence
  source: /note="Description of Artificial Sequence: Synthetic polypeptide"
  source: /note="N-term Amino group"
  MOD_RES (1)..(1): Pra
  MOD_RES (7)..(7): Nle
  source: /note="C-term Amide"
GYCQKWLWTCDSERACCKGLRCKLWCRKII

SEQ ID NO: 730 - protein, 30 aa, Artificial Sequence
  source: /note="Description of Artificial Sequence: Synthetic polypeptide"
  source: /note="N-term Amino group"
  MOD_RES (1)..(1): Pra
  MOD_RES (7)..(7): Nle
  source: /note="C-term Amide"
GYCQKWLWTCDSERACCEGLRCKLWCRKII

SEQ ID NO: 731 - protein, 28 aa, Artificial Sequence
  source: /note="Description of Artificial Sequence: Synthetic peptide"
  source: /note="N-term Amino group"
  MOD_RES (5)..(5): Nle
  MOD_RES (11)..(11): Lys(ivDde)
  source: /note="C-term Amide"
CQKWLWTCDSKRACCEGLRCKLWCRKEI

SEQ ID NO: 732 - protein, 30 aa, Artificial Sequence
  source: /note="Description of Artificial Sequence: Synthetic polypeptide"
  source: /note="N-term Amino group"
  MOD_RES (1)..(1): CyA
  MOD_RES (7)..(7): Nle
  MOD_RES (18)..(18): Pra
  source: /note="C-term Amide"
AYCQKWLWTCDSERACCGGLRCKLWCRKEI

SEQ ID NO: 733 - protein, 30 aa, Artificial Sequence
  source: /note="Description of Artificial Sequence: Synthetic polypeptide"
  source: /note="N-term Amino group"
  MOD_RES (1)..(1): CyA
  MOD_RES (7)..(7): Nle
  MOD_RES (18)..(18): Pra
  source: /note="C-term Amide"
AYCQKWLWTCDSKRECCGGLRCKLWCRKEI

SEQ ID NO: 734 - protein, 31 aa, Artificial Sequence
  source: /note="Description of Artificial Sequence: Synthetic polypeptide"
  source: /note="N-term Amino group"
  MOD_RES (2)..(2): Pra
  MOD_RES (8)..(8): Nle
  source: /note="C-term Amide"
EGYCQKWLWTCDEKRACCEGLRCKLWCRKEI

SEQ ID NO: 735 - protein, 31 aa, Artificial Sequence
  source: /note="Description of Artificial Sequence: Synthetic polypeptide"
  source: /note="N-term Amino group"
  MOD_RES (2)..(2): Pra
  MOD_RES (8)..(8): Nle
  source: /note="C-term Amide"
EGYCQKWLWTCDSERACCEGLRCKLWCRKEI

SEQ ID NO: 736 - protein, 30 aa, Artificial Sequence
  source: /note="Description of Artificial Sequence: Synthetic polypeptide"
  source: /note="N-term Amino group"
  MOD_RES (2)..(2): Pra
  MOD_RES (7)..(7): Nle
  source: /note="C-term Amide"
EGCQKWLWTCDEKRACCEGLRCKLWCRKEI

SEQ ID NO: 737 - protein, 30 aa, Artificial Sequence
  source: /note="Description of Artificial Sequence: Synthetic polypeptide"
  source: /note="N-term Amino group"
  MOD_RES (2)..(2): Pra
  MOD_RES (7)..(7): Nle
  source: /note="C-term Amide"
EGCQKWLWTCDSERACCEGLRCKLWCRKEI

SEQ ID NO: 738 - protein, 30 aa, Artificial Sequence
  source: /note="Description of Artificial Sequence: Synthetic polypeptide"
  source: /note="N-term Amino group"
  MOD_RES (2)..(2): Pra
  MOD_RES (7)..(7): Nle
  source: /note="C-term Amide"
EGCQKWLWTCDSKRECCEGLRCKLWCRKEI

SEQ ID NO: 739 - protein, 30 aa, Artificial Sequence
  source: /note="Description of Artificial Sequence: Synthetic polypeptide"
  source: /note="N-term Amino group"
  MOD_RES (1)..(1): Pra
  MOD_RES (7)..(7): Nle
  source: /note="C-term Amide"
GECQKWLWTCDEKRACCEGLRCKLWCRKEI

SEQ ID NO: 740 - protein, 31 aa, Artificial Sequence
  source: /note="Description of Artificial Sequence: Synthetic polypeptide"
  source: /note="N-term Amino group"
  MOD_RES (2)..(2): Pra
  MOD_RES (8)..(8): Nle
  source: /note="C-term Amide"
EGYCQKWLWTCDSKRECCEGLRCKLWCRKEI

SEQ ID NO: 741 - protein, 31 aa, Artificial Sequence
  source: /note="Description of Artificial Sequence: Synthetic polypeptide"
  source: /note="N-term Amino group"
  MOD_RES (2)..(2): Pra
  MOD_RES (8)..(8): Nle
  source: /note="C-term Amide"
EGECQKWLWTCDEKRACCEGLRCKLWCRKEI

SEQ ID NO: 742 - protein, 30 aa, Artificial Sequence
  source: /note="Description of Artificial Sequence: Synthetic polypeptide"
  source: /note="N-term Amino group"
  MOD_RES (1)..(1): Pra
  MOD_RES (7)..(7): Nle
  source: /note="C-term Amide"
GECQKWLWTCDSERACCEGLRCKLWCRKEI

SEQ ID NO: 743 - protein, 30 aa, Artificial Sequence
  source: /note="Description of Artificial Sequence: Synthetic polypeptide"
  source: /note="N-term Amino group"
  MOD_RES (1)..(1): Pra
  MOD_RES (7)..(7): Nle
  source: /note="C-term Amide"
GECQKWLWTCDSKRECCEGLRCKLWCRKEI

SEQ ID NO: 744 - protein, 30 aa, Artificial Sequence
  source: /note="Description of Artificial Sequence: Synthetic polypeptide"
  source: /note="N-term Amino group"
  MOD_RES (1)..(1): Pra
  MOD_RES (7)..(7): Nle
  source: /note="C-term Amide"
GYCQKWLWTCDEERACCEGLRCKLWCRKEI

SEQ ID NO: 745 - protein, 30 aa, Artificial Sequence
  source: /note="Description of Artificial Sequence: Synthetic polypeptide"
  source: /note="N-term Amino group"
  MOD_RES (1)..(1): Pra
  MOD_RES (7)..(7): Nle
  source: /note="C-term Amide"
GYCQKWLWTCDEKRECCEGLRCKLWCRKEI

SEQ ID NO: 746 - protein, 31 aa, Artificial Sequence
  source: /note="Description of Artificial Sequence: Synthetic polypeptide"
  source: /note="N-term Amino group"
  MOD_RES (2)..(2): Pra
  MOD_RES (8)..(8): Nle
  source: /note="C-term Amide"
EGECQKWLWTCDSERACCEGLRCKLWCRKEI

SEQ ID NO: 747 - protein, 30 aa, Artificial Sequence
  source: /note="Description of Artificial Sequence: Synthetic polypeptide"
  source: /note="N-term Amino group"
  MOD_RES (1)..(1): Pra
  MOD_RES (7)..(7): Nle
  source: /note="C-term Amide"
GYCQKWLWTCDSERECCEGLRCKLWCRKEI

SEQ ID NO: 748 - protein, 30 aa, Artificial Sequence
  source: /note="Description of Artificial Sequence: Synthetic polypeptide"
  source: /note="N-term Amino group"
  MOD_RES (2)..(2): Pra
  MOD_RES (7)..(7): Nle
  source: /note="C-term Amide"
EGCQKWLWTCDEERACCEGLRCKLWCRKEI

SEQ ID NO: 749 - protein, 30 aa, Artificial Sequence
  source: /note="Description of Artificial Sequence: Synthetic polypeptide"
  source: /note="N-term Amino group"
  MOD_RES (2)..(2): Pra
  MOD_RES (7)..(7): Nle
  source: /note="C-term Amide"
EGCQKWLWTCDSERECCEGLRCKLWCRKEI

SEQ ID NO: 750 - protein, 30 aa, Artificial Sequence
  source: /note="Description of Artificial Sequence: Synthetic polypeptide"
  source: /note="N-term Amino group"
  MOD_RES (2)..(2): Pra
  MOD_RES (7)..(7): Nle
  source: /note="C-term Amide"
EGCQKWLWTCDEKRECCEGLRCKLWCRKEI

SEQ ID NO: 751 - protein, 30 aa, Artificial Sequence
  source: /note="Description of Artificial Sequence: Synthetic polypeptide"
  source: /note="N-term Amino group"
  MOD_RES (1)..(1): Pra
  MOD_RES (7)..(7): Nle
  source: /note="C-term Amide"
GECQKWLWTCDEKRECCEGLRCKLWCRKEI

SEQ ID NO: 752 - protein, 31 aa, Artificial Sequence
  source: /note="Description of Artificial Sequence: Synthetic polypeptide"
  source: /note="N-term Amino group"
  MOD_RES (2)..(2): Pra
  MOD_RES (8)..(8): Nle
  source: /note="C-term Amide"
EGECQKWLWTCDSKRECCEGLRCKLWCRKEI

SEQ ID NO: 753 - protein, 30 aa, Artificial Sequence
  source: /note="Description of Artificial Sequence: Synthetic polypeptide"
  source: /note="N-term Amino group"
  MOD_RES (1)..(1): Pra
  MOD_RES (7)..(7): Nle
  source: /note="C-term Amide"
GECQKWLWTCDSERECCEGLRCKLWCRKEI

SEQ ID NO: 754 - protein, 30 aa, Artificial Sequence
  source: /note="Description of Artificial Sequence: Synthetic polypeptide"
  source: /note="N-term Amino group"
  MOD_RES (1)..(1): Pra
  MOD_RES (7)..(7): Nle
  source: /note="C-term Amide"
GECQKWLWTCDEERACCEGLRCKLWCRKEI

SEQ ID NO: 755 - protein, 30 aa, Artificial Sequence
  source: /note="Description of Artificial Sequence: Synthetic polypeptide"
  source: /note="N-term Amino group"
  MOD_RES (1)..(1): Pra
  MOD_RES (7)..(7): Nle
  source: /note="C-term Amide"
GYCQKWLWTCDEERECCEGLRCKLWCRKEI

SEQ ID NO: 756 - protein, 30 aa, Artificial Sequence
  source: /note="Description of Artificial Sequence: Synthetic polypeptide"
  source: /note="N-term Amino group"
  MOD_RES (1)..(1): CyA
  MOD_RES (7)..(7): Nle
  MOD_RES (18)..(18): Pra
  source: /note="C-term Amide"
AECQKWLWTCDSERECCGGLRCKLWCRKEI

SEQ ID NO: 757 - protein, 30 aa, Artificial Sequence
  source: /note="Description of Artificial Sequence: Synthetic polypeptide"
  source: /note="N-term Amino group"
  MOD_RES (1)..(1): CyA
  MOD_RES (7)..(7): Nle
  MOD_RES (18)..(18): Pra
  source: /note="C-term Amide"
AECQKWLWTCDEERECCGGLRCKLWCRKEI

SEQ ID NO: 758 - protein, 30 aa, Artificial Sequence; identical to SEQ ID NO: 388
  source: /note="Description of Artificial Sequence: Synthetic polypeptide"
  source: /note="N-term Amino group"
  MOD_RES (1)..(1): CyA
  MOD_RES (7)..(7): Nle
  MOD_RES (18)..(18): Pra
  source: /note="C-term Amide"

SEQ ID NO: 759 - protein, 30 aa, Artificial Sequence
  source: /note="Description of Artificial Sequence: Synthetic polypeptide"
  source: /note="N-term Amino group"
  MOD_RES (1)..(1): CyA
  MOD_RES (7)..(7): Nle
  MOD_RES (18)..(18): Pra
  source: /note="C-term Amide"
AYCQKWLWTCDSERACCGGLRCKLWCRKII

SEQ ID NO: 760 - protein, 30 aa, Artificial Sequence
  source: /note="Description of Artificial Sequence: Synthetic polypeptide"
  source: /note="N-term Amino group"
  MOD_RES (1)..(1): CyA
  MOD_RES (7)..(7): Nle
  MOD_RES (18)..(18): Pra
  source: /note="C-term Amide"
AYCQKWLWTCDSKRECCGGLRCKLWCRKII

SEQ ID NO: 761 - protein, 30 aa, Artificial Sequence
  source: /note="Description of Artificial Sequence: Synthetic polypeptide"
  source: /note="N-term Amino group"
  MOD_RES (1)..(1): CyA
  MOD_RES (7)..(7): Nle
  MOD_RES (18)..(18): Pra
  source: /note="C-term Amide"
AYCQKWLWTCDSKRACCGGLRCKLWCREII

SEQ ID NO: 762 - protein, 30 aa, Artificial Sequence
  source: /note="Description of Artificial Sequence: Synthetic polypeptide"
  source: /note="N-term Amino group"
  MOD_RES (1)..(1): Nva
  MOD_RES (7)..(7): Nle
  MOD_RES (18)..(18): Pra
  source: /note="C-term Amide"
VYCQKWLWTCDSERECCGGLRCKLWCRKII

SEQ ID NO: 763 - protein, 30 aa, Artificial Sequence
  source: /note="Description of Artificial Sequence: Synthetic polypeptide"
  source: /note="N-term Amino group"
  MOD_RES (1)..(1): CyA
  MOD_RES (7)..(7): Nle
  MOD_RES (18)..(18): Pra
  source: /note="C-term Amide"
AYCQKWLWTCDSERACCGGLRCKLWCREII

SEQ ID NO: 764 - protein, 30 aa, Artificial Sequence
  source: /note="Description of Artificial Sequence: Synthetic polypeptide"
  source: /note="N-term Amino group"
  MOD_RES (1)..(1): CyA
  MOD_RES (7)..(7): Nle
  MOD_RES (18)..(18): Pra
  source: /note="C-term Amide"
AYCQKWLWTCDSKRACCGGLRCKLWCREEI

SEQ ID NO: 765 - protein, 30 aa, Artificial Sequence
  source: /note="Description of Artificial Sequence: Synthetic polypeptide"
  source: /note="N-term Amino group"
  MOD_RES (1)..(1): CyA
  MOD_RES (7)..(7): Nle
  MOD_RES (18)..(18): Pra
  source: /note="C-term Amide"
AYCQKWLWTCDEKRACCGGLRCKLWCRKEI

SEQ ID NO: 766 - protein, 30 aa, Artificial Sequence
  source: /note="Description of Artificial Sequence: Synthetic polypeptide"
  source: /note="N-term Amino group"
  MOD_RES (2)..(2): CyA
  MOD_RES (7)..(7): Nle
  MOD_RES (18)..(18): Pra
  source: /note="C-term Amide"
EACQKWLWTCDEKRACCGGLRCKLWCRKEI

SEQ ID NO: 767 - protein, 30 aa, Artificial Sequence
  source: /note="Description of Artificial Sequence: Synthetic polypeptide"
  source: /note="N-term Amino group"
  MOD_RES (7)..(7): Nle
  MOD_RES (18)..(18): Pra
  source: /note="C-term Amide"
EYCQKWLWTCDEKRACCGGLRCKLWCRKEI

SEQ ID NO: 768 - protein, 30 aa, Artificial Sequence
  source: /note="Description of Artificial Sequence: Synthetic polypeptide"
  source: /note="N-term Amino group"
  MOD_RES (1)..(1): CyA
  MOD_RES (7)..(7): Nle
  MOD_RES (18)..(18): Pra
  source: /note="C-term Amide"
AECQKWLWTCDEKRACCGGLRCKLWCRKEI

SEQ ID NO: 769 - protein, 31 aa, Artificial Sequence
  source: /note="Description of Artificial Sequence: Synthetic polypeptide"
  source: /note="N-term Amino group"
  MOD_RES (2)..(2): Nva
  MOD_RES (8)..(8): Nle
  MOD_RES (19)..(19): Pra
  source: /note="C-term Amide"
EVYCQKWLWTCDEKRACCGGLRCKLWCRKEI

SEQ ID NO: 770 - protein, 30 aa, Artificial Sequence
  source: /note="Description of Artificial Sequence: Synthetic polypeptide"
  source: /note="N-term Amino group"
  MOD_RES (1)..(1): Nva
  MOD_RES (7)..(7): Nle
  MOD_RES (18)..(18): Pra
  source: /note="C-term Amide"
VECQKWLWTCDSKRECCGGLRCKLWCRKEI

SEQ ID NO: 771 - protein, 30 aa, Artificial Sequence
  source: /note="Description of Artificial Sequence: Synthetic polypeptide"
  source: /note="N-term Amino group"
  MOD_RES (1)..(1): CyA
  MOD_RES (7)..(7): Nle
  MOD_RES (18)..(18): Pra
  source: /note="C-term Amide"
AECQKWLWTCDSKRECCGGLRCKLWCRKEI

SEQ ID NO: 772 - protein, 31 aa, Artificial Sequence
  source: /note="Description of Artificial Sequence: Synthetic polypeptide"
  source: /note="N-term Amino group"
  MOD_RES (2)..(2): Nva
  MOD_RES (8)..(8): Nle
  MOD_RES (19)..(19): Pra
  source: /note="C-term Amide"
EVECQKWLWTCDEKRACCGGLRCKLWCRKEI

SEQ ID NO: 773 - protein, 30 aa, Artificial Sequence
  source: /note="Description of Artificial Sequence: Synthetic polypeptide"
  source: /note="N-term Amino group"
  MOD_RES (2)..(2): Nva
  MOD_RES (7)..(7): Nle
  MOD_RES (18)..(18): Pra
  source: /note="C-term Amide"
EVCQKWLWTCDSKRECCGGLRCKLWCRKEI

SEQ ID NO: 774 - protein, 30 aa, Artificial Sequence
  source: /note="Description of Artificial Sequence: Synthetic polypeptide"
  source: /note="N-term Amino group"
  MOD_RES (2)..(2): Nva
  MOD_RES (7)..(7): Nle
  MOD_RES (18)..(18): Pra
  source: /note="C-term Amide"
EVCQKWLWTCDEKRACCGGLRCKLWCRKEI

SEQ ID NO: 775 - protein, 30 aa, Artificial Sequence
  source: /note="Description of Artificial Sequence: Synthetic polypeptide"
  source: /note="N-term Amino group"
  MOD_RES (1)..(1): Pra
  MOD_RES (7)..(7): Nle
  MOD_RES (14)..(14): Cit
  source: /note="C-term Amide"
GYCQKWLWTCDSKXACCEGLRCKLWCRKEI

SEQ ID NO: 776 - protein, 30 aa, Artificial Sequence
  source: /note="Description of Artificial Sequence: Synthetic polypeptide"
  source: /note="N-term Amino group"
  MOD_RES (1)..(1): Pra
  MOD_RES (5)..(5): BhGln
  MOD_RES (7)..(7): Nle
  source: /note="C-term Amide"
GYCQQWLWTCDSKRACCEGLRCKLWCRKEI

SEQ ID NO: 777 - protein, 30 aa, Artificial Sequence
  source: /note="Description of Artificial Sequence: Synthetic polypeptide"
  source: /note="N-term Amino group"
  MOD_RES (1)..(1): Pra
  MOD_RES (7)..(7): Nle
  MOD_RES (13)..(13): BhGln
  source: /note="C-term Amide"
GYCQKWLWTCDSQRACCEGLRCKLWCRKEI

SEQ ID NO: 778 - protein, 30 aa, Artificial Sequence
  source: /note="Description of Artificial Sequence: Synthetic polypeptide"
  source: /note="N-term Amino group"
  MOD_RES (1)..(1): Pra
  MOD_RES (7)..(7): Nle
  MOD_RES (14)..(14): BhGln
  source: /note="C-term Amide"
GYCQKWLWTCDSKQACCEGLRCKLWCRKEI

SEQ ID NO: 779 - protein, 30 aa, Artificial Sequence; identical to SEQ ID NO: 642
  source: /note="Description of Artificial Sequence: Synthetic polypeptide"
  source: /note="N-term Amino group"
  MOD_RES (1)..(1): Pra
  MOD_RES (7)..(7): Nle
  MOD_RES (21)..(21): BhGln
  source: /note="C-term Amide"

SEQ ID NO: 780 - protein, 30 aa, Artificial Sequence
  source: /note="Description of Artificial Sequence: Synthetic polypeptide"
  source: /note="N-term Amino group"
  MOD_RES (1)..(1): Pra
  MOD_RES (7)..(7): Nle
  MOD_RES (23)..(23): BhGln
  source: /note="C-term Amide"
GYCQKWLWTCDSKRACCEGLRCQLWCRKEI

SEQ ID NO: 781 - protein, 30 aa, Artificial Sequence
  source: /note="Description of Artificial Sequence: Synthetic polypeptide"
  source: /note="N-term Amino group"
  MOD_RES (1)..(1): Pra
  MOD_RES (7)..(7): Nle
  MOD_RES (27)..(27): BhGln
  source: /note="C-term Amide"
GYCQKWLWTCDSKRACCEGLRCKLWCQKEI

SEQ ID NO: 782 - protein, 30 aa, Artificial Sequence
  source: /note="Description of Artificial Sequence: Synthetic polypeptide"
  source: /note="N-term Amino group"
  MOD_RES (1)..(1): Pra
  MOD_RES (7)..(7): Nle
  MOD_RES (28)..(28): BhGln
  source: /note="C-term Amide"
GYCQKWLWTCDSKRACCEGLRCKLWCRQEI

SEQ ID NO: 783 - protein, 30 aa, Artificial Sequence
  source: /note="Description of Artificial Sequence: Synthetic polypeptide"
  source: /note="N-term Amino group"
  MOD_RES (1)..(1): Pra
  MOD_RES (5)..(5): BhGln
  MOD_RES (7)..(7): Nle
  MOD_RES (14)..(14): Cit
  source: /note="C-term Amide"
GYCQQWLWTCDSKXACCEGLRCKLWCRKEI

SEQ ID NO: 784 - protein, 30 aa, Artificial Sequence
  source: /note="Description of Artificial Sequence: Synthetic polypeptide"
  source: /note="N-term Amino group"
  MOD_RES (1)..(1): Pra
  MOD_RES (5)..(5): BhGln
  MOD_RES (7)..(7): Nle
  MOD_RES (21)..(21): Cit
  source: /note="C-term Amide"
GYCQQWLWTCDSKRACCEGLXCKLWCRKEI

SEQ ID NO: 785 - protein, 30 aa, Artificial Sequence
  source: /note="Description of Artificial Sequence: Synthetic polypeptide"
  source: /note="N-term Amino group"
  MOD_RES (1)..(1): Pra
  MOD_RES (5)..(5): BhGln
  MOD_RES (7)..(7): Nle
  MOD_RES (27)..(27): Cit
  source: /note="C-term Amide"
GYCQQWLWTCDSKRACCEGLRCKLWCXKEI

SEQ ID NO: 786 - protein, 30 aa, Artificial Sequence
  source: /note="Description of Artificial Sequence: Synthetic polypeptide"
  source: /note="N-term Amino group"
  MOD_RES (1)..(1): Pra
  MOD_RES (7)..(7): Nle
  MOD_RES (13)..(13): BhGln
  MOD_RES (14)..(14): Cit
  source: /note="C-term Amide"
GYCQKWLWTCDSQXACCEGLRCKLWCRKEI

SEQ ID NO: 787 - protein, 30 aa, Artificial Sequence
  source: /note="Description of Artificial Sequence: Synthetic polypeptide"
  source: /note="N-term Amino group"
  MOD_RES (1)..(1): Pra
  MOD_RES (7)..(7): Nle
  MOD_RES (13)..(13): BhGln
  MOD_RES (21)..(21): Cit
  source: /note="C-term Amide"
GYCQKWLWTCDSQRACCEGLXCKLWCRKEI

SEQ ID NO: 788 - protein, 30 aa, Artificial Sequence
  source: /note="Description of Artificial Sequence: Synthetic polypeptide"
  source: /note="N-term Amino group"
  MOD_RES (1)..(1): Pra
  MOD_RES (7)..(7): Nle
  MOD_RES (13)..(13): BhGln
  MOD_RES (27)..(27): Cit
  source: /note="C-term Amide"
GYCQKWLWTCDSQRACCEGLRCKLWCXKEI

SEQ ID NO: 789 - protein, 30 aa, Artificial Sequence
  source: /note="Description of Artificial Sequence: Synthetic polypeptide"
  source: /note="N-term Amino group"
  MOD_RES (1)..(1): Pra
  MOD_RES (7)..(7): Nle
  MOD_RES (14)..(14): Cit
  MOD_RES (23)..(23): BhGln
  source: /note="C-term Amide"
GYCQKWLWTCDSKXACCEGLRCQLWCRKEI

SEQ ID NO: 790 - protein, 30 aa, Artificial Sequence
  source: /note="Description of Artificial Sequence: Synthetic polypeptide"
  source: /note="N-term Amino group"
  MOD_RES (1)..(1): Pra
  MOD_RES (7)..(7): Nle
  MOD_RES (21)..(21): Cit
  MOD_RES (23)..(23): BhGln
  source: /note="C-term Amide"
GYCQKWLWTCDSKRACCEGLXCQLWCRKEI

SEQ ID NO: 791 - protein, 30 aa, Artificial Sequence
  source: /note="Description of Artificial Sequence: Synthetic polypeptide"
  source: /note="N-term Amino group"
  MOD_RES (1)..(1): Pra
  MOD_RES (7)..(7): Nle
  MOD_RES (23)..(23): BhGln
  MOD_RES (27)..(27): Cit
  source: /note="C-term Amide"
GYCQKWLWTCDSKRACCEGLRCQLWCXKEI

SEQ ID NO: 792 - protein, 30 aa, Artificial Sequence
  source: /note="Description of Artificial Sequence: Synthetic polypeptide"
  source: /note="N-term Amino group"
  MOD_RES (1)..(1): Pra
  MOD_RES (7)..(7): Nle
  MOD_RES (14)..(14): Cit
  MOD_RES (28)..(28): BhGln
  source: /note="C-term Amide"
GYCQKWLWTCDSKXACCEGLRCKLWCRQEI

SEQ ID NO: 793 - protein, 30 aa, Artificial Sequence
  source: /note="Description of Artificial Sequence: Synthetic polypeptide"
  source: /note="N-term Amino group"
  MOD_RES (1)..(1): Pra
  MOD_RES (7)..(7): Nle
  MOD_RES (21)..(21): Cit
  MOD_RES (28)..(28): BhGln
  source: /note="C-term Amide"
GYCQKWLWTCDSKRACCEGLXCKLWCRQEI

SEQ ID NO: 794 - protein, 30 aa, Artificial Sequence
  source: /note="Description of Artificial Sequence: Synthetic polypeptide"
  source: /note="N-term Amino group"
  MOD_RES (1)..(1): Pra
  MOD_RES (7)..(7): Nle
  MOD_RES (27)..(27): Cit
  MOD_RES (28)..(28): BhGln
  source: /note="C-term Amide"
GYCQKWLWTCDSKRACCEGLRCKLWCXQEI

SEQ ID NO: 795 - protein, 30 aa, Artificial Sequence
  source: /note="Description of Artificial Sequence: Synthetic polypeptide"
  source: /note="N-term Amino group"
  MOD_RES (1)..(1): Pra
  MOD_RES (7)..(7): Nle
  MOD_RES (21)..(21): Cit
  source: /note="C-term Amide"
GYCQKWLWTCDSKRACCEGLXCKLWCRKEI

SEQ ID NO: 796 - protein, 30 aa, Artificial Sequence
  source: /note="Description of Artificial Sequence: Synthetic polypeptide"
  source: /note="N-term Amino group"
  MOD_RES (1)..(1): Pra
  MOD_RES (7)..(7): Nle
  MOD_RES (27)..(27): Cit
  source: /note="C-term Amide"
GYCQKWLWTCDSKRACCEGLRCKLWCXKEI

SEQ ID NO: 797 - protein, 30 aa, Artificial Sequence
  source: /note="Description of Artificial Sequence: Synthetic polypeptide"
  source: /note="N-term Amino group"
  MOD_RES (1)..(1): Pra
  MOD_RES (7)..(7): Nle
  MOD_RES (14)..(14): Cit
  MOD_RES (21)..(21): Cit
  source: /note="C-term Amide"
GYCQKWLWTCDSKXACCEGLXCKLWCRKEI

SEQ ID NO: 798 - protein, 30 aa, Artificial Sequence
  source: /note="Description of Artificial Sequence: Synthetic polypeptide"
  source: /note="N-term Amino group"
  MOD_RES (1)..(1): Pra
  MOD_RES (7)..(7): Nle
  MOD_RES (14)..(14): Cit
  MOD_RES (27)..(27): Cit
  source: /note="C-term Amide"
GYCQKWLWTCDSKXACCEGLRCKLWCXKEI

SEQ ID NO: 799 - protein, 30 aa, Artificial Sequence
  source: /note="Description of Artificial Sequence: Synthetic polypeptide"
  source: /note="N-term Amino group"
  MOD_RES (1)..(1): Pra
  MOD_RES (7)..(7): Nle
  MOD_RES (21)..(21): Cit
  MOD_RES (27)..(27): Cit
  source: /note="C-term Amide"
GYCQKWLWTCDSKRACCEGLXCKLWCXKEI

SEQ ID NO: 800 - protein, 30 aa, Artificial Sequence
  source: /note="Description of Artificial Sequence: Synthetic polypeptide"
  source: /note="N-term Amino group"
  MOD_RES (1)..(1): Pra
  MOD_RES (7)..(7): Nle
  MOD_RES (14)..(14): Cit
  MOD_RES (21)..(21): Cit
  MOD_RES (27)..(27): Cit
  source: /note="C-term Amide"
GYCQKWLWTCDSKXACCEGLXCKLWCXKEI

SEQ ID NO: 801 - protein, 30 aa, Artificial Sequence; identical to SEQ ID NO: 776
  source: /note="Description of Artificial Sequence: Synthetic polypeptide"
  source: /note="N-term Amino group"
  MOD_RES (1)..(1): Pra
  MOD_RES (7)..(7): Nle
  source: /note="C-term Amide"

SEQ ID NO: 802 - protein, 30 aa, Artificial Sequence; identical to SEQ ID NO: 777
  source: /note="Description of Artificial Sequence: Synthetic polypeptide"
  source: /note="N-term Amino group"
  MOD_RES (1)..(1): Pra
  MOD_RES (7)..(7): Nle
  source: /note="C-term Amide"

SEQ ID NO: 803 - protein, 30 aa, Artificial Sequence; identical to SEQ ID NO: 778
  source: /note="Description of Artificial Sequence: Synthetic polypeptide"
  source: /note="N-term Amino group"
  MOD_RES (1)..(1): Pra
  MOD_RES (7)..(7): Nle
  source: /note="C-term Amide"

SEQ ID NO: 804 - protein, 30 aa, Artificial Sequence; identical to SEQ ID NO: 780
  source: /note="Description of Artificial Sequence: Synthetic polypeptide"
  source: /note="N-term Amino group"
  MOD_RES (1)..(1): Pra
  MOD_RES (7)..(7): Nle
  source: /note="C-term Amide"

SEQ ID NO: 805 - protein, 30 aa, Artificial Sequence; identical to SEQ ID NO: 781
  source: /note="Description of Artificial Sequence: Synthetic polypeptide"
  source: /note="N-term Amino group"
  MOD_RES (1)..(1): Pra
  MOD_RES (7)..(7): Nle
  source: /note="C-term Amide"

SEQ ID NO: 806 - protein, 30 aa, Artificial Sequence; identical to SEQ ID NO: 782
  source: /note="Description of Artificial Sequence: Synthetic polypeptide"
  source: /note="N-term Amino group"
  MOD_RES (1)..(1): Pra
  MOD_RES (7)..(7): Nle
  source: /note="C-term Amide"

SEQ ID NO: 807 - protein, 30 aa, Artificial Sequence; identical to SEQ ID NO: 783
  source: /note="Description of Artificial Sequence: Synthetic polypeptide"
  source: /note="N-term Amino group"
  MOD_RES (1)..(1): Pra
  MOD_RES (7)..(7): Nle
  MOD_RES (14)..(14): Cit
  source: /note="C-term Amide"

SEQ ID NO: 808 - protein, 30 aa, Artificial Sequence; identical to SEQ ID NO: 784
  source: /note="Description of Artificial Sequence: Synthetic polypeptide"
  source: /note="N-term Amino group"
  MOD_RES (1)..(1): Pra
  MOD_RES (7)..(7): Nle
  MOD_RES (21)..(21): Cit
  source: /note="C-term Amide"

SEQ ID NO: 809 - protein, 30 aa, Artificial Sequence; identical to SEQ ID NO: 785
  source: /note="Description of Artificial Sequence: Synthetic polypeptide"
  source: /note="N-term Amino group"
  MOD_RES (1)..(1): Pra
  MOD_RES (7)..(7): Nle
  MOD_RES (27)..(27): Cit
  source: /note="C-term Amide"

SEQ ID NO: 810 - protein, 30 aa, Artificial Sequence; identical to SEQ ID NO: 786
  source: /note="Description of Artificial Sequence: Synthetic polypeptide"
  source: /note="N-term Amino group"
  MOD_RES (1)..(1): Pra
  MOD_RES (7)..(7): Nle
  MOD_RES (14)..(14): Cit
  source: /note="C-term Amide"

SEQ ID NO: 811 - protein, 30 aa, Artificial Sequence; identical to SEQ ID NO: 787
  source: /note="Description of Artificial Sequence: Synthetic polypeptide"
  source: /note="N-term Amino group"
  MOD_RES (1)..(1): Pra
  MOD_RES (7)..(7): Nle
  MOD_RES (21)..(21): Cit
  source: /note="C-term Amide"

SEQ ID NO: 812 - protein, 30 aa, Artificial Sequence; identical to SEQ ID NO: 793
  source: /note="Description of Artificial Sequence: Synthetic polypeptide"
  source: /note="N-term Amino group"
  MOD_RES (1)..(1): Pra
  MOD_RES (7)..(7): Nle
  MOD_RES (21)..(21): Cit
  source: /note="C-term Amide"

SEQ ID NO: 813 - protein, 30 aa, Artificial Sequence; identical to SEQ ID NO: 794
  source: /note="Description of Artificial Sequence: Synthetic polypeptide"
  source: /note="N-term Amino group"
  MOD_RES (1)..(1): Pra
  MOD_RES (7)..(7): Nle
  MOD_RES (27)..(27): Cit
  source: /note="C-term Amide"

SEQ ID NO: 814 - protein, 30 aa, Artificial Sequence; identical to SEQ ID NO: 788
  source: /note="Description of Artificial Sequence: Synthetic polypeptide"
  source: /note="N-term Amino group"
  MOD_RES (1)..(1): Pra
  MOD_RES (7)..(7): Nle
  MOD_RES (27)..(27): Cit
  source: /note="C-term Amide"

SEQ ID NO: 815 - protein, 30 aa, Artificial Sequence; identical to SEQ ID NO: 792
  source: /note="Description of Artificial Sequence: Synthetic polypeptide"
  source: /note="N-term Amino group"
  MOD_RES (1)..(1): Pra
  MOD_RES (7)..(7): Nle
  MOD_RES (14)..(14): Cit
  source: /note="C-term Amide"

SEQ ID NO: 816 - protein, 30 aa, Artificial Sequence; identical to SEQ ID NO: 789
  source: /note="Description of Artificial Sequence: Synthetic polypeptide"
  source: /note="N-term Amino group"
  MOD_RES (1)..(1): Pra
  MOD_RES (7)..(7): Nle
  MOD_RES (14)..(14): Cit
  source: /note="C-term Amide"

SEQ ID NO: 817 - protein, 30 aa, Artificial Sequence; identical to SEQ ID NO: 790
  source: /note="Description of Artificial Sequence: Synthetic polypeptide"
  source: /note="N-term Amino group"
  MOD_RES (1)..(1): Pra
  MOD_RES (7)..(7): Nle
  MOD_RES (21)..(21): Cit
  source: /note="C-term Amide"

SEQ ID NO: 818 - protein, 30 aa, Artificial Sequence; identical to SEQ ID NO: 791
  source: /note="Description of Artificial Sequence: Synthetic polypeptide"
  source: /note="N-term Amino group"
  MOD_RES (1)..(1): Pra
  MOD_RES (7)..(7): Nle
  MOD_RES (27)..(27): Cit
  source: /note="C-term Amide"

SEQ ID NO: 819 - protein, 30 aa, Artificial Sequence
  source: /note="Description of Artificial Sequence: Synthetic polypeptide"
  source: /note="N-term Amino group"
  MOD_RES (1)..(1): CyA
  MOD_RES (7)..(7): Nle
  MOD_RES (18)..(18): Pra
  source: /note="C-term Amide"
AYCQKWLWTCDSARACCGGLRCKLWCRKEI

SEQ ID NO: 820 - protein, 30 aa, Artificial Sequence
  source: /note="Description of Artificial Sequence: Synthetic polypeptide"
  source: /note="N-term Amino group"
  MOD_RES (1)..(1): CyA
  MOD_RES (7)..(7): Nle
  MOD_RES (18)..(18): Pra
  source: /note="C-term Amide"
AYCQKWLWTCDSKRACCGDLRCKLWCRKEI

SEQ ID NO: 821 - protein, 30 aa, Artificial Sequence
  source: /note="Description of Artificial Sequence: Synthetic polypeptide"
  source: /note="N-term Amino group"
  MOD_RES (1)..(1): CyA
  MOD_RES (7)..(7): Nle
  MOD_RES (18)..(18): Pra
  source: /note="C-term Amide"
AYCQKWLWTCDSKRACCGGLVCKLWCRKEI

SEQ ID NO: 822 - protein, 30 aa, Artificial Sequence
  source: /note="Description of Artificial Sequence: Synthetic polypeptide"
  source: /note="N-term Amino group"
  MOD_RES (1)..(1): CyA
  MOD_RES (7)..(7): Nle
  MOD_RES (18)..(18): Pra
  source: /note="C-term Amide"
AYCQKWLWTCDSKRACCGGLRCQLWCRKEI

SEQ ID NO: 823 - protein, 30 aa, Artificial Sequence
  source: /note="Description of Artificial Sequence: Synthetic polypeptide"
  source: /note="N-term Amino group"
  MOD_RES (1)..(1): CyA
  MOD_RES (7)..(7): Nle
  MOD_RES (18)..(18): Pra
  source: /note="C-term Amide"
AYCQKWLWTCDSKRACCGGLRCKLWCRYEI

SEQ ID NO: 824 - protein, 30 aa, Artificial Sequence
  source: /note="Description of Artificial Sequence: Synthetic polypeptide"
  source: /note="N-term Amino group"
  MOD_RES (1)..(1): CyA
  MOD_RES (7)..(7): Nle
  MOD_RES (18)..(18): Pra
  source: /note="C-term Amide"
AYCQKWLWTCDSKRACCGGLRCKLWCRLEI

SEQ ID NO: 825 - protein, 30 aa, Artificial Sequence
  source: /note="Description of Artificial Sequence: Synthetic polypeptide"
  source: /note="N-term Amino group"
  MOD_RES (1)..(1): Pra
  MOD_RES (7)..(7): Nle
  source: /note="C-term Amide"
GYCQKWLWTCDSERKCCEGYVCELWCKYNL

SEQ ID NO: 826 - protein, 29 aa, Artificial Sequence
  source: /note="Description of Artificial Sequence: Synthetic peptide"
  source: /note="N-term Amino group"
  MOD_RES (6)..(6): Nle
  MOD_RES (17)..(17): Pra
  source: /note="C-term Amide"
YCQKWLWTCDSERKCCGGYVCELWCKYNL

SEQ ID NO: 827 - protein, 30 aa, Artificial Sequence; identical to SEQ ID NO: 359
  source: /note="Description of Artificial Sequence: Synthetic polypeptide"
  source: /note="N-term Amino group"
  MOD_RES (1)..(1): Pra
  MOD_RES (7)..(7): Nle
  source: /note="C-term FreeAcid"

SEQ ID NO: 828 - protein, 31 aa, Artificial Sequence
  source: /note="Description of Artificial Sequence: Synthetic polypeptide"
  source: /note="N-term Amino group"
  MOD_RES (1)..(1): Pra
  MOD_RES (7)..(7): Nle
  source: /note="C-term FreeAcid"
GYCQKWLWTCDSKRACCEGLRCKLWCRKEIG

SEQ ID NO: 829 - protein, 30 aa, Artificial Sequence; identical to SEQ ID NO: 328
  source: /note="Description of Artificial Sequence: Synthetic polypeptide"
  source: /note="N-term Amino group"
  MOD_RES (1)..(1): Pra
  MOD_RES (7)..(7): Nle
  source: /note="C-term FreeAcid"

SEQ ID NO: 830 - protein, 31 aa, Artificial Sequence
  source: /note="Description of Artificial Sequence: Synthetic polypeptide"
  source: /note="N-term Amino group"
  MOD_RES (1)..(1): CyA
  MOD_RES (7)..(7): Nle
  MOD_RES (18)..(18): Pra
  source: /note="C-term FreeAcid"
AYCQKWLWTCDSKRACCGGLRCKLWCKKKLW

SEQ ID NO: 831 - protein, 33 aa, Artificial Sequence
  source: /note="Description of Artificial Sequence: Synthetic polypeptide"
  source: /note="N-term Amino group"
  MOD_RES (1)..(1): CyA
  MOD_RES (7)..(7): Nle
  MOD_RES (18)..(18): Pra
  source: /note="C-term FreeAcid"
AYCQKWLWTCDSKRACCGGLRCKLWCRKEIEEG

SEQ ID NO: 832 - protein, 33 aa, Artificial Sequence
  source: /note="Description of Artificial Sequence: Synthetic polypeptide"
  source: /note="N-term Amino group"
  MOD_RES (1)..(1): CyA
  MOD_RES (7)..(7): Nle
  MOD_RES (18)..(18): Pra
  source: /note="C-term FreeAcid"
AYCQKWLWTCDSKRACCGGLRCKLWCRKKIEEG

SEQ ID NO: 833 - protein, 32 aa, Artificial Sequence
  source: /note="Description of Artificial Sequence: Synthetic polypeptide"
  source: /note="N-term Amino group"
  MOD_RES (1)..(1): CyA
  MOD_RES (7)..(7): Nle
  MOD_RES (18)..(18): Pra
  source: /note="C-term FreeAcid"
AYCQKWLWTCDSKRACCGGLRCKLWCRKEIEW

SEQ ID NO: 834 - protein, 32 aa, Artificial Sequence
  source: /note="Description of Artificial Sequence: Synthetic polypeptide"
  source: /note="N-term Amino group"
  MOD_RES (1)..(1): CyA
  MOD_RES (7)..(7): Nle
  MOD_RES (18)..(18): Pra
  source: /note="C-term FreeAcid"
AYCQKWLWTCDSKRACCGGLRCKLWCRKKIEW

SEQ ID NO: 835 - protein, 30 aa, Artificial Sequence; identical to SEQ ID NO: 715
  source: /note="Description of Artificial Sequence: Synthetic polypeptide"
  source: /note="N-term Amino group"
  MOD_RES (1)..(1): Pra
  MOD_RES (3)..(3): SeCys
  MOD_RES (7)..(7): Nle
  MOD_RES (17)..(17): SeCys
  source: /note="C-term Amide"

SEQ ID NO: 836 - protein, 30 aa, Artificial Sequence; identical to SEQ ID NO: 715
  source: /note="Description of Artificial Sequence: Synthetic polypeptide"
  source: /note="N-term Amino group"
  MOD_RES (1)..(1): Pra
  MOD_RES (7)..(7): Nle
  MOD_RES (10)..(10): SeCys
  MOD_RES (22)..(22): SeCys
  source: /note="C-term Amide"

SEQ ID NO: 837 - protein, 30 aa, Artificial Sequence; identical to SEQ ID NO: 715
  source: /note="Description of Artificial Sequence: Synthetic polypeptide"
  source: /note="N-term Amino group"
  MOD_RES (1)..(1): Pra
  MOD_RES (7)..(7): Nle
  MOD_RES (16)..(16): SeCys
  MOD_RES (26)..(26): SeCys
  source: /note="C-term Amide"

SEQ ID NO: 838 - protein, 30 aa, Artificial Sequence; identical to SEQ ID NO: 328
  source: /note="Description of Artificial Sequence: Synthetic polypeptide"
  source: /note="N-term Amino group"
  MOD_RES (1)..(1): Pra
  MOD_RES (3)..(3): SeCys
  MOD_RES (7)..(7): Nle
  MOD_RES (17)..(17): SeCys
  source: /note="C-term Amide"

SEQ ID NO: 839 - protein, 30 aa, Artificial Sequence; identical to SEQ ID NO: 328
  source: /note="Description of Artificial Sequence: Synthetic polypeptide"
  source: /note="N-term Amino group"
  MOD_RES (1)..(1): Pra
  MOD_RES (7)..(7): Nle
  MOD_RES (10)..(10): SeCys
  MOD_RES (22)..(22): SeCys
  source: /note="C-term Amide"

SEQ ID NO: 840 - protein, 30 aa, Artificial Sequence; identical to SEQ ID NO: 328
  source: /note="Description of Artificial Sequence: Synthetic polypeptide"
  source: /note="N-term Amino group"
  MOD_RES (1)..(1): Pra
  MOD_RES (7)..(7): Nle
  MOD_RES (16)..(16): SeCys
  MOD_RES (26)..(26): SeCys
  source: /note="C-term Amide"

SEQ ID NO: 841 - protein, 30 aa, Artificial Sequence
  source: /note="Description of Artificial Sequence: Synthetic polypeptide"
  source: /note="N-term Amino group"
  MOD_RES (1)..(1): Pra
  MOD_RES (6)..(6): 1-Nal
  MOD_RES (7)..(7): Nle
  source: /note="C-term Amide"
GYCQKALWTCDSKRACCEGLRCKLWCRKEI

SEQ ID NO: 842 - protein, 30 aa, Artificial Sequence; identical to SEQ ID NO: 841
  source: /note="Description of Artificial Sequence: Synthetic polypeptide"
  source: /note="N-term Amino group"
  MOD_RES (1)..(1): Pra
  MOD_RES (6)..(6): 2-Nal
  MOD_RES (7)..(7): Nle
  source: /note="C-term Amide"

SEQ ID NO: 843 - protein, 30 aa, Artificial Sequence
  source: /note="Description of Artificial Sequence: Synthetic polypeptide"
  source: /note="N-term Amino group"
  MOD_RES (1)..(1): Pra
  MOD_RES (7)..(7): Nle
  source: /note="C-term Amide"
GYCQKFLWTCDSKRACCEGLRCKLWCRKEI

SEQ ID NO: 844 - protein, 30 aa, Artificial Sequence; identical to SEQ ID NO: 843
  source: /note="Description of Artificial Sequence: Synthetic polypeptide"
  source: /note="N-term Amino group"
  MOD_RES (1)..(1): Pra
  MOD_RES (6)..(6): hPhe
  MOD_RES (7)..(7): Nle
  source: /note="C-term Amide"

SEQ ID NO: 845 - protein, 30 aa, Artificial Sequence; identical to SEQ ID NO: 328
  source: /note="Description of Artificial Sequence: Synthetic polypeptide"
  source: /note="N-term Amino group"
  MOD_RES (1)..(1): Pra
  MOD_RES (6)..(6): 5-Br-Trp
  MOD_RES (7)..(7): Nle
  source: /note="C-term Amide"

SEQ ID NO: 846 - protein, 30 aa, Artificial Sequence
  source: /note="Description of Artificial Sequence: Synthetic polypeptide"
  source: /note="N-term Amino group"
  MOD_RES (1)..(1): Pra
  MOD_RES (7)..(7): Nle
  MOD_RES (8)..(8): 1-Nal
  source: /note="C-term Amide"
GYCQKWLATCDSKRACCEGLRCKLWCRKEI

SEQ ID NO: 847 - protein, 30 aa, Artificial Sequence; identical to SEQ ID NO: 846
  source: /note="Description of Artificial Sequence: Synthetic polypeptide"
  source: /note="N-term Amino group"
  MOD_RES (1)..(1): Pra
  MOD_RES (7)..(7): Nle
  MOD_RES (8)..(8): 2-Nal
  source: /note="C-term Amide"

SEQ ID NO: 848 - protein, 30 aa, Artificial Sequence
  source: /note="Description of Artificial Sequence: Synthetic polypeptide"
  source: /note="N-term Amino group"
  MOD_RES (1)..(1): Pra
  MOD_RES (7)..(7): Nle
  source: /note="C-term Amide"
GYCQKWLFTCDSKRACCEGLRCKLWCRKEI

SEQ ID NO: 849 - protein, 30 aa, Artificial Sequence; identical to SEQ ID NO: 848
  source: /note="Description of Artificial Sequence: Synthetic polypeptide"
  source: /note="N-term Amino group"
  MOD_RES (1)..(1): Pra
  MOD_RES (7)..(7): Nle
  MOD_RES (8)..(8): hPhe
  source: /note="C-term Amide"

SEQ ID NO: 850 - protein, 30 aa, Artificial Sequence; identical to SEQ ID NO: 328
  source: /note="Description of Artificial Sequence: Synthetic polypeptide"
  source: /note="N-term Amino group"
  MOD_RES (1)..(1): Pra
  MOD_RES (7)..(7): Nle
  MOD_RES (8)..(8): 5-Br-Trp
  source: /note="C-term Amide"

SEQ ID NO: 851 - protein, 30 aa, Artificial Sequence
  source: /note="Description of Artificial Sequence: Synthetic polypeptide"
  source: /note="N-term Amino group"
  MOD_RES (1)..(1): Pra
  MOD_RES (7)..(7): Nle
  MOD_RES (25)..(25): 1-Nal
  source: /note="C-term Amide"
GYCQKWLWTCDSKRACCEGLRCKLACRKEI

SEQ ID NO: 852 - protein, 30 aa, Artificial Sequence; identical to SEQ ID NO: 851
  source: /note="Description of Artificial Sequence: Synthetic polypeptide"
  source: /note="N-term Amino group"
  MOD_RES (1)..(1): Pra
  MOD_RES (7)..(7): Nle
  MOD_RES (25)..(25): 2-Nal
  source: /note="C-term Amide"

SEQ ID NO: 853 - protein, 30 aa, Artificial Sequence
  source: /note="Description of Artificial Sequence: Synthetic polypeptide"
  source: /note="N-term Amino group"
  MOD_RES (1)..(1): Pra
  MOD_RES (7)..(7): Nle
  source: /note="C-term Amide"
GYCQKWLWTCDSKRACCEGLRCKLFCRKEI

SEQ ID NO: 854 - protein, 30 aa, Artificial Sequence; identical to SEQ ID NO: 853
  source: /note="Description of Artificial Sequence: Synthetic polypeptide"
  source: /note="N-term Amino group"
  MOD_RES (1)..(1): Pra
  MOD_RES (7)..(7): Nle
  MOD_RES (25)..(25): hPhe
  source: /note="C-term Amide"

SEQ ID NO: 855 - protein, 30 aa, Artificial Sequence
  source: /note="Description of Artificial Sequence: Synthetic polypeptide"
  source: /note="N-term Amino group"
  MOD_RES (1)..(1): Pra
  MOD_RES (7)..(7): Nle
  source: /note="C-term Amide"
GYCQKWLWTCDSKRACCEGLRCKIWCRKEI

SEQ ID NO: 856 - protein, 30 aa, Artificial Sequence; identical to SEQ ID NO: 328
  source: /note="Description of Artificial Sequence: Synthetic polypeptide"
  source: /note="N-term Amino group"
  MOD_RES (1)..(1): Pra
  MOD_RES (7)..(7): Nle
  MOD_RES (24)..(24): Nle
  source: /note="C-term Amide"

SEQ ID NO: 857 - protein, 30 aa, Artificial Sequence
  source: /note="Description of Artificial Sequence: Synthetic polypeptide"
  source: /note="N-term Amino group"
  MOD_RES (1)..(1): Pra
  MOD_RES (7)..(7): Nle
  MOD_RES (24)..(24): Nva
  source: /note="C-term Amide"
GYCQKWLWTCDSKRACCEGLRCKVWCRKEI

SEQ ID NO: 858 - protein, 30 aa, Artificial Sequence; identical to SEQ ID NO: 328
  source: /note="Description of Artificial Sequence: Synthetic polypeptide"
  source: /note="N-term Amino group"
  MOD_RES (1)..(1): Pra
  MOD_RES (7)..(7): Nle
  MOD_RES (25)..(25): 5-Br-Trp
  source: /note="C-term Amide"

SEQ ID NO: 859 - protein, 30 aa, Artificial Sequence
  source: /note="Description of Artificial Sequence: Synthetic polypeptide"
  source: /note="N-term Amino group"
  MOD_RES (1)..(1): Pra
  MOD_RES (7)..(7): Nle
  MOD_RES (24)..(24): Chg
  source: /note="C-term Amide"
GYCQKWLWTCDSKRACCEGLRCKGWCRKEI

SEQ ID NO: 860 - protein, 30 aa, Artificial Sequence
  source: /note="Description of Artificial Sequence: Synthetic polypeptide"
  source: /note="N-term Amino group"
  MOD_RES (1)..(1): Pra
  MOD_RES (7)..(7): Nle
  MOD_RES (24)..(24): Cha
  source: /note="C-term Amide"
GYCQKWLWTCDSKRACCEGLRCKAWCRKEI

SEQ ID NO: 861 - protein, 30 aa, Artificial Sequence
  source: /note="Description of Artificial Sequence: Synthetic polypeptide"
  source: /note="N-term Amino group"
  MOD_RES (1)..(1): Pra
  MOD_RES (7)..(7): Nle
  source: /note="C-term Amide"
GYCQKWLWTCDSKRACCEGLRCKLWCRKEF

SEQ ID NO: 862 - protein, 30 aa, Artificial Sequence
  source: /note="Description of Artificial Sequence: Synthetic polypeptide"
  source: /note="N-term Amino group"
  MOD_RES (1)..(1): Pra
  MOD_RES (7)..(7): Nle
  MOD_RES (30)..(30): Cha
  source: /note="C-term Amide"
GYCQKWLWTCDSKRACCEGLRCKLWCRKEA

SEQ ID NO: 863 - protein, 30 aa, Artificial Sequence
  source: /note="Description of Artificial Sequence: Synthetic polypeptide"
  source: /note="N-term Amino group"
  MOD_RES (1)..(1): Pra
  source: /note="C-term Amide"
GYCQKWFWTCDSKRACCEGLRCKLWCRKEI

SEQ ID NO: 864 - protein, 30 aa, Artificial Sequence
  source: /note="Description of Artificial Sequence: Synthetic polypeptide"
  source: /note="N-term Amino group"
  MOD_RES (1)..(1): CyA
  MOD_RES (6)..(6): hPhe
  MOD_RES (7)..(7): Nle
  MOD_RES (18)..(18): Pra
  source: /note="C-term Amide"
AYCQKFLWTCDSKRACCGGLRCKLWCRKEI

SEQ ID NO: 865 - protein, 30 aa, Artificial Sequence
  source: /note="Description of Artificial Sequence: Synthetic polypeptide"
  source: /note="N-term Amino group"
  MOD_RES (1)..(1): CyA
  MOD_RES (7)..(7): Nle
  MOD_RES (18)..(18): Pra
  MOD_RES (30)..(30): Cha
  source: /note="C-term Amide"
AYCQKWLWTCDSKRACCGGLRCKLWCRKEA

SEQ ID NO: 866 - protein, 30 aa, Artificial Sequence
  source: /note="Description of Artificial Sequence: Synthetic polypeptide"
  source: /note="N-term Amino group"
  MOD_RES (1)..(1): CyA
  MOD_RES (7)..(7): Nle
  MOD_RES (18)..(18): Pra
  MOD_RES (30)..(30): Cha
  source: /note="C-term Amide"
AECQKWLWTCDSKRACCGGLRCKLWCRKEA

SEQ ID NO: 867 - protein, 30 aa, Artificial Sequence
  source: /note="Description of Artificial Sequence: Synthetic polypeptide"
  source: /note="N-term Amino group"
  MOD_RES (6)..(6): hPhe
  MOD_RES (7)..(7): Nle
  MOD_RES (18)..(18): Pra
  MOD_RES (30)..(30): Cha
  source: /note="C-term Amide"
EYCQKFLWTCDSKRACCGGLRCKLWCRKEA

SEQ ID NO: 868 - protein, 31 aa, Artificial Sequence
  source: /note="Description of Artificial Sequence: Synthetic polypeptide"
  source: /note="N-term Amino group"
  MOD_RES (2)..(2): Nva
  MOD_RES (8)..(8): Nle
  MOD_RES (19)..(19): Pra
  MOD_RES (31)..(31): Cha
  source: /note="C-term Amide"
EVYCQKWLWTCDSKRACCGGLRCKLWCRKEA

SEQ ID NO: 869 - protein, 30 aa, Artificial Sequence
  source: /note="Description of Artificial Sequence: Synthetic polypeptide"
  source: /note="N-term Amino group"
  MOD_RES (1)..(1): CyA
  MOD_RES (7)..(7): Nle
  MOD_RES (18)..(18): Pra
  MOD_RES (30)..(30): Cha
  source: /note="C-term Amide"
AECQKWLWTCDEKRACCGGLRCKLWCRKEA

SEQ ID NO: 870 - protein, 30 aa, Artificial Sequence; identical to SEQ ID NO: 395
  source: /note="Description of Artificial Sequence: Synthetic polypeptide"
  source: /note="N-term Amino group"
  MOD_RES (1)..(1): CyA
  MOD_RES (7)..(7): Nle
  MOD_RES (18)..(18): Pra
  MOD_RES (25)..(25): 5-Br-Trp
  source: /note="C-term Amide"

SEQ ID NO: 871 - protein, 30 aa, Artificial Sequence; identical to SEQ ID NO: 359
  source: /note="Description of Artificial Sequence: Synthetic polypeptide"
  source: /note="N-term Amino group"
  MOD_RES (1)..(1): Pra
  MOD_RES (7)..(7): Nle
  MOD_RES (25)..(25): 5-Br-Trp
  source: /note="C-term Amide"

SEQ ID NO: 872 - protein, 30 aa, Artificial Sequence; identical to SEQ ID NO: 388
  source: /note="Description of Artificial Sequence: Synthetic polypeptide"
  source: /note="N-term Amino group"
  MOD_RES (1)..(1): CyA
  MOD_RES (7)..(7): Nle
  MOD_RES (18)..(18): Pra
  MOD_RES (25)..(25): 5-Br-Trp
  source: /note="C-term Amide"

SEQ ID NO: 873 - protein, 30 aa, Artificial Sequence; identical to SEQ ID NO: 395
  source: /note="Description of Artificial Sequence: Synthetic polypeptide"
  source: /note="N-term Amino group"
  MOD_RES (1)..(1): CyA
  MOD_RES (7)..(7): Nle
  MOD_RES (18)..(18): Pra
  MOD_RES (25)..(25): 6-Br-Trp
  source: /note="C-term Amide"

SEQ ID NO: 874 - protein, 30 aa, Artificial Sequence; identical to SEQ ID NO: 395
  source: /note="Description of Artificial Sequence: Synthetic polypeptide"
  source: /note="N-term Amino group"
  MOD_RES (1)..(1): CyA
  MOD_RES (7)..(7): Nle
  MOD_RES (18)..(18): Pra
  MOD_RES (25)..(25): 6-Me-Trp
  source: /note="C-term Amide"

SEQ ID NO: 875 - protein, 30 aa, Artificial Sequence; identical to SEQ ID NO: 395
  source: /note="Description of Artificial Sequence: Synthetic polypeptide"
  source: /note="N-term Amino group"
  MOD_RES (1)..(1): CyA
  MOD_RES (7)..(7): Nle
  MOD_RES (18)..(18): Pra
  MOD_RES (25)..(25): 7-Br-Trp
  source: /note="C-term Amide"

SEQ ID NO: 876 - protein, 30 aa, Artificial Sequence
  source: /note="Description of Artificial Sequence: Synthetic polypeptide"
  source: /note="N-term Amino group"
  MOD_RES (1)..(1): CyA
  MOD_RES (7)..(7): Nle
  MOD_RES (18)..(18): Pra
  source: /note="C-term Amide"
AYCQKWLWTCDSKRACCGGLRCKLWCRKEF

SEQ ID NO: 877 - protein, 30 aa, Artificial Sequence; identical to SEQ ID NO: 876
  source: /note="Description of Artificial Sequence: Synthetic polypeptide"
  source: /note="N-term Amino group"
  MOD_RES (1)..(1): CyA
  MOD_RES (7)..(7): Nle
  MOD_RES (18)..(18): Pra
  MOD_RES (30)..(30): hPhe
  source: /note="C-term Amide"

SEQ ID NO: 878 - protein, 30 aa, Artificial Sequence
  source: /note="Description of Artificial Sequence: Synthetic polypeptide"
  source: /note="N-term Amino group"
  MOD_RES (1)..(1): Pra
  MOD_RES (6)..(6): hPhe
  MOD_RES (7)..(7): Nle
  MOD_RES (30)..(30): Cha
  source: /note="C-term Amide"
GYCQKFLWTCDSKRACCEGLRCKLWCRKEA

SEQ ID NO: 879 - protein, 29 aa, Artificial Sequence
  source: /note="Description of Artificial Sequence: Synthetic peptide"
  source: /note="N-term Amino group"
  MOD_RES (6)..(6): Nle
  MOD_RES (12)..(12): Pra
  source: /note="C-term Amide"
YCQKWLWTCDSGRACCEGLRCKLWCRKEI

SEQ ID NO: 880 - protein, 30 aa, Artificial Sequence; identical to SEQ ID NO: 392
  source: /note="Description of Artificial Sequence: Synthetic polypeptide"
  source: /note="N-term Amino group"
  MOD_RES (1)..(1): CyA
  MOD_RES (7)..(7): Nle
  MOD_RES (15)..(15): KPPG3
  source: /note="C-term Amide"

SEQ ID NO: 881 - protein, 30 aa, Artificial Sequence; identical to SEQ ID NO: 392
  source: /note="Description of Artificial Sequence: Synthetic polypeptide"
  source: /note="N-term Amino group"
  MOD_RES (1)..(1): CyA
  MOD_RES (15)..(15): KPPG3
  source: /note="C-term Amide"

SEQ ID NO: 882 - protein, 30 aa, Artificial Sequence; identical to SEQ ID NO: 328
  source: /note="Description of Artificial Sequence: Synthetic polypeptide"
  source: /note="N-term Amino group"
  MOD_RES (1)..(1): Pra
  MOD_RES (7)..(7): Nle
  MOD_RES (13)..(13): Lys(AOA)
  source: /note="C-term Amide"

SEQ ID NO: 883 - protein, 30 aa, Artificial Sequence; identical to SEQ ID NO: 338
  source: /note="Description of Artificial Sequence: Synthetic polypeptide"
  source: /note="N-term Amino group"
  MOD_RES (1)..(1): Atz(NPeg9)
  MOD_RES (7)..(7): Nle
  source: /note="C-term Amide"

SEQ ID NO: 884 - protein, 30 aa, Artificial Sequence; identical to SEQ ID NO: 338
  source: /note="Description of Artificial Sequence: Synthetic polypeptide"
  source: /note="N-term Amino group"
  MOD_RES (1)..(1): Atz(PEG11-bromoacetamide)
  MOD_RES (7)..(7): Nle
  source: /note="C-term Amide"

SEQ ID NO: 885 - protein, 30 aa, Artificial Sequence; identical to SEQ ID NO: 338
  source: /note="Description of Artificial Sequence: Synthetic polypeptide"
  source: /note="N-term Amino group"
  MOD_RES (1)..(1): Atz
  MOD_RES (7)..(7): Nle
  source: /note="C-term Amide"

SEQ ID NO: 886 - protein, 30 aa, Artificial Sequence; identical to SEQ ID NO: 368
  source: /note="Description of Artificial Sequence: Synthetic polypeptide"
  source: /note="N-term Amino group"
  MOD_RES (1)..(1): N3PGAzNH
  MOD_RES (7)..(7): Nle
  source: /note="C-term Amide"

SEQ ID NO: 887 - protein, 30 aa, Artificial Sequence; identical to SEQ ID NO: 247
  source: /note="Description of Artificial Sequence: Synthetic polypeptide"
  source: /note="N-term Amino group"
  MOD_RES (1)..(1): Atz(PEG11-bromoacetamide)
  MOD_RES (7)..(7): Nle
  source: /note="C-term Amide"

SEQ ID NO: 888 - protein, 30 aa, Artificial Sequence; identical to SEQ ID NO: 443
  source: /note="Description of Artificial Sequence: Synthetic polypeptide"
  source: /note="N-term Amino group"
  MOD_RES (1)..(1): CyA
  MOD_RES (7)..(7): Nle
  MOD_RES (18)..(18): Atz(PEG11-bromoacetamide)
  source: /note="C-term Amide"

SEQ ID NO: 889 - protein, 30 aa, Artificial Sequence; identical to SEQ ID NO: 443
  source: /note="Description of Artificial Sequence: Synthetic polypeptide"
  source: /note="N-term Amino group"
  MOD_RES (1)..(1): CyA
  MOD_RES (7)..(7): Nle
  MOD_RES (18)..(18): Atz
  source: /note="C-term Amide")

SEQ ID NO: 890 - protein, 31 aa, Artificial Sequence
  source: /note="Description of Artificial Sequence: Synthetic polypeptide"
  source: /note="N-term Amino group"
  MOD_RES (2)..(2): CyA
  MOD_RES (8)..(8): Nle
  MOD_RES (16)..(16): Lys(Atz(PEG11-bromoacetamide))
  source: /note="C-term Amide"
KAYCQKWLWTCDSKRKCCEGLRCKLWCRKEI

SEQ ID NO: 891 - protein, 31 aa, Artificial Sequence; identical to SEQ ID NO: 890
  source: /note="Description of Artificial Sequence: Synthetic polypeptide"
  source: /note="N-term Amino group"
  MOD_RES (2)..(2): CyA
  MOD_RES (8)..(8): Nle
  MOD_RES (16)..(16): Lys(Atz(NPeg9))
  source: /note="C-term Amide"

SEQ ID NO: 892 - protein, 31 aa, Artificial Sequence; identical to SEQ ID NO: 890
  source: /note="Description of Artificial Sequence: Synthetic polypeptide"
  source: /note="N-term Amino group"
  MOD_RES (2)..(2): CyA
  MOD_RES (8)..(8): Nle
  MOD_RES (16)..(16): Lys(Atz)
  source: /note="C-term Amide"

SEQ ID NO: 893 - protein, 30 aa, Artificial Sequence; identical to SEQ ID NO: 338
  source: /note="Description of Artificial Sequence: Synthetic polypeptide"
  source: /note="N-term Amino group"
  MOD_RES (1)..(1): Atz
  MOD_RES (7)..(7): Nle
  MOD_RES (25)..(25): 5-Br-Trp
  source: /note="C-term Amide"

SEQ ID NO: 894 - protein, 30 aa, Artificial Sequence; identical to SEQ ID NO: 443
  source: /note="Description of Artificial Sequence: Synthetic polypeptide"
  source: /note="N-term Amino group"
  MOD_RES (1)..(1): CyA
  MOD_RES (7)..(7): Nle
  MOD_RES (18)..(18): Atz
  MOD_RES (25)..(25): 5-Br-Trp
  source: /note="C-term Amide"

SEQ ID NO: 895 - protein, 30 aa, Artificial Sequence; identical to SEQ ID NO: 443
  source: /note="Description of Artificial Sequence: Synthetic polypeptide"
  source: /note="N-term Amino group"
  MOD_RES (1)..(1): CyA
  MOD_RES (7)..(7): Nle
  MOD_RES (18)..(18): Atz(palmitate)
  source: /note="C-term Amide"

SEQ ID NO: 896 - protein, 30 aa, Artificial Sequence; identical to SEQ ID NO: 443
  source: /note="Description of Artificial Sequence: Synthetic polypeptide"
  source: /note="N-term Amino group"
  MOD_RES (1)..(1): CyA
  MOD_RES (7)..(7): Nle
  MOD_RES (18)..(18): Atz modified with a unique side chain
  source: /note="C-term Amide"
  source: /note="see specification as filed for detailed description of substitutions and preferred embodiments"

SEQ ID NO: 897 - protein, 30 aa, Artificial Sequence; identical to SEQ ID NO: 443
  source: /note="Description of Artificial Sequence: Synthetic polypeptide"
  source: /note="N-term Amino group"
  MOD_RES (1)..(1): CyA
  MOD_RES (7)..(7): Nle
  MOD_RES (18)..(18): Atz modified with a unique side chain
  source: /note="C-term Amide"
  source: /note="see specification as filed for detailed description of substitutions and preferred embodiments"

SEQ ID NO: 898 - protein, 30 aa, Artificial Sequence; identical to SEQ ID NO: 247
  source: /note="Description of Artificial Sequence: Synthetic polypeptide"
  source: /note="N-term Amino group"
  MOD_RES (1)..(1): Atz(ClickBiotin)
  MOD_RES (7)..(7): Nle
  source: /note="C-term Amide"

SEQ ID NO: 899 - protein, 30 aa, Artificial Sequence; identical to SEQ ID NO: 338
  source: /note="Description of Artificial Sequence: Synthetic polypeptide"
  source: /note="N-term Amino group"
  MOD_RES (1)..(1): Atz(palmitate)
  MOD_RES (7)..(7): Nle
  source: /note="C-term Amide"

SEQ ID NO: 900 - protein, 30 aa, Artificial Sequence
  source: /note="Description of Artificial Sequence: Synthetic polypeptide"
  source: /note="N-term Amino group"
  MOD_RES (1)..(1): CyA
  MOD_RES (2)..(2): Atz(palmitate)
  MOD_RES (7)..(7): Nle
  source: /note="C-term Amide"
AACQKWLWTCDSKRACCEGLRCKLWCRKEI

SEQ ID NO: 901 - protein, 30 aa, Artificial Sequence
  source: /note="Description of Artificial Sequence: Synthetic polypeptide"
  source: /note="N-term Amino group"
  MOD_RES (1)..(1): CyA
  MOD_RES (7)..(7): Nle
  MOD_RES (12)..(12): Atz(palmitate)
  source: /note="C-term Amide"
AYCQKWLWTCDAKRACCEGLRCKLWCRKEI

SEQ ID NO: 902 - protein, 30 aa, Artificial Sequence
  source: /note="Description of Artificial Sequence: Synthetic polypeptide"
  source: /note="N-term Amino group"
  MOD_RES (1)..(1): CyA
  MOD_RES (7)..(7): Nle
  MOD_RES (13)..(13): Atz(palmitate)
  source: /note="C-term Amide"
AYCQKWLWTCDSARACCEGLRCKLWCRKEI

SEQ ID NO: 903 - protein, 30 aa, Artificial Sequence; identical to SEQ ID NO: 392
  source: /note="Description of Artificial Sequence: Synthetic polypeptide"
  source: /note="N-term Amino group"
  MOD_RES (1)..(1): CyA
  MOD_RES (7)..(7): Nle
  MOD_RES (15)..(15): Lys(Atz(palmitate))
  source: /note="C-term Amide"

SEQ ID NO: 904 - protein, 30 aa, Artificial Sequence; identical to SEQ ID NO: 338
  source: /note="Description of Artificial Sequence: Synthetic polypeptide"
  source: /note="N-term Amino group"
  MOD_RES (1)..(1): Atz modified with a unique sidechain
  MOD_RES (7)..(7): Nle
  source: /note="C-term Amide"
  source: /note="see specification as filed for detailed description of substitutions and preferred embodiments"

SEQ ID NO: 905 - protein, 30 aa, Artificial Sequence; identical to SEQ ID NO: 900
  source: /note="Description of Artificial Sequence: Synthetic polypeptide"
  source: /note="N-term Amino group"
  MOD_RES (1)..(1): CyA
  MOD_RES (2)..(2): Atz modified with a unique side chain
  MOD_RES (7)..(7): Nle
  source: /note="C-term Amide"
  source: /note="see specification as filed for detailed description of substitutions and preferred embodiments"

SEQ ID NO: 906 - protein, 30 aa, Artificial Sequence; identical to SEQ ID NO: 901
  source: /note="Description of Artificial Sequence: Synthetic polypeptide"
  source: /note="N-term Amino group"
  MOD_RES (1)..(1): CyA
  MOD_RES (7)..(7): Nle
  MOD_RES (12)..(12): Atz modified with a unique side chain
  source: /note="C-term Amide"
  source: /note="see specification as filed for detailed description of substitutions and preferred embodiments"

SEQ ID NO: 907 - protein, 30 aa, Artificial Sequence; identical to SEQ ID NO: 902
  source: /note="Description of Artificial Sequence: Synthetic polypeptide"
  source: /note="N-term Amino group"
  MOD_RES (1)..(1): CyA
  MOD_RES (7)..(7): Nle
  MOD_RES (13)..(13): Atz modified with a unique side chain
  source: /note="C-term Amide"

SEQ ID NO: 908 - protein, 30 aa, Artificial Sequence; identical to SEQ ID NO: 392
  source: /note="Description of Artificial Sequence: Synthetic polypeptide"
  source: /note="N-term Amino group"
  MOD_RES (1)..(1): CyA
  MOD_RES (7)..(7): Nle
  MOD_RES (15)..(15): Lys modified with a unique side chain
  source: /note="C-term Amide"
  source: /note="see specification as filed for detailed description of substitutions and preferred embodiments"

SEQ ID NO: 909 - protein, 31 aa, Artificial Sequence
  source: /note="Description of Artificial Sequence: Synthetic polypeptide"
  source: /note="N-term Amino group"
  MOD_RES (1)..(1): CyA
  MOD_RES (7)..(7): Nle
  MOD_RES (18)..(18): Pra
  source: /note="C-term FreeAcid"
AYCQKWLWTCDSKRACCGGLRCKLWCRKEIW

SEQ ID NO: 910 - protein, 30 aa, Artificial Sequence
  source: /note="Description of Artificial Sequence: Synthetic polypeptide"
  source: /note="N-term Amino group"
  MOD_RES (1)..(1): CyA
  MOD_RES (7)..(7): Nle
  MOD_RES (18)..(18): Pra
  source: /note="C-term FreeAcid"
AYCQKWLWTCDSKRACCGGLRCKLWCRLNL

SEQ ID NO: 911 - protein, 31 aa, Artificial Sequence
  source: /note="Description of Artificial Sequence: Synthetic polypeptide"
  source: /note="N-term Amino group"
  MOD_RES (1)..(1): Pra
  MOD_RES (7)..(7): Nle
  source: /note="C-term FreeAcid"
GYCQKWLWTCDSKRACCEGLRCKLWCRKEIW

SEQ ID NO: 912 - protein, 32 aa, Artificial Sequence
  source: /note="Description of Artificial Sequence: Synthetic polypeptide"
  source: /note="N-term Amino group"
  MOD_RES (1)..(1): Pra
  MOD_RES (7)..(7): Nle
  source: /note="C-term FreeAcid"
GYCQKWLWTCDSKRACCEGLRCKLWCRKEIEW

SEQ ID NO: 913 - protein, 33 aa, Artificial Sequence
  source: /note="Description of Artificial Sequence: Synthetic polypeptide"
  source: /note="N-term Amino group"
  MOD_RES (1)..(1): Pra
  MOD_RES (7)..(7): Nle
  source: /note="C-term FreeAcid"
GYCQKWLWTCDSKRACCEGLRCKLWCRKEIEEG

SEQ ID NO: 914 - protein, 32 aa, Artificial Sequence
  source: /note="Description of Artificial Sequence: Synthetic polypeptide"
  source: /note="N-term Amino group"
  MOD_RES (1)..(1): Pra
  MOD_RES (7)..(7): Nle
  source: /note="C-term FreeAcid"
GYCQKWLWTCDSKRACCEGLRCKLWCRKKIEW

SEQ ID NO: 915 - protein, 33 aa, Artificial Sequence
  source: /note="Description of Artificial Sequence: Synthetic polypeptide"
  source: /note="N-term Amino group"
  MOD_RES (1)..(1): Pra
  MOD_RES (7)..(7): Nle
  source: /note="C-term FreeAcid"
GYCQKWLWTCDSKRACCEGLRCKLWCRKKIEEG

SEQ ID NO: 916 - protein, 30 aa, Artificial Sequence
  source: /note="Description of Artificial Sequence: Synthetic polypeptide"
  source: /note="N-term Amino group"
  MOD_RES (1)..(1): Pra
  MOD_RES (7)..(7): Nle
  source: /note="C-term FreeAcid"
GYCQKWLWTCDSKRACCEGLRCKLWCRLNL

SEQ ID NO: 917 - protein, 31 aa, Artificial Sequence
  source: /note="Description of Artificial Sequence: Synthetic polypeptide"
  source: /note="N-term Amino group"
  MOD_RES (1)..(1): CyA
  MOD_RES (7)..(7): Nle
  MOD_RES (18)..(18): Pra
  source: /note="C-term FreeAcid"
AYCQKWLWTCDSKRACCGGLRCKLWCRKIIW

SEQ ID NO: 918 - protein, 32 aa, Artificial Sequence
  source: /note="Description of Artificial Sequence: Synthetic polypeptide"
  source: /note="N-term Amino group"
  MOD_RES (1)..(1): CyA
  MOD_RES (7)..(7): Nle
  MOD_RES (18)..(18): Pra
  source: /note="C-term FreeAcid"
AYCQKWLWTCDSKRACCGGLRCKLWCRKIIEW

SEQ ID NO: 919 - protein, 33 aa, Artificial Sequence
  source: /note="Description of Artificial Sequence: Synthetic polypeptide"
  source: /note="N-term Amino group"
  MOD_RES (1)..(1): CyA
  MOD_RES (7)..(7): Nle
  MOD_RES (18)..(18): Pra
  source: /note="C-term FreeAcid"
AYCQKWLWTCDSKRACCGGLRCKLWCRKIIEEG

SEQ ID NO: 920 - protein, 31 aa, Artificial Sequence
  source: /note="Description of Artificial Sequence: Synthetic polypeptide"
  source: /note="N-term Amino group"
  MOD_RES (1)..(1): Pra
  MOD_RES (7)..(7): Nle
  source: /note="C-term FreeAcid"
GYCQKWLWTCDSKRACCEGLRCKLWCRKIIW

SEQ ID NO: 921 - protein, 32 aa, Artificial Sequence
  source: /note="Description of Artificial Sequence: Synthetic polypeptide"
  source: /note="N-term Amino group"
  MOD_RES (1)..(1): Pra
  MOD_RES (7)..(7): Nle
  source: /note="C-term FreeAcid"
GYCQKWLWTCDSKRACCEGLRCKLWCRKIIEW

SEQ ID NO: 922 - protein, 33 aa, Artificial Sequence
  source: /note="Description of Artificial Sequence: Synthetic polypeptide"
  source: /note="N-term Amino group"
  MOD_RES (1)..(1): Pra
  MOD_RES (7)..(7): Nle
  source: /note="C-term FreeAcid"
GYCQKWLWTCDSKRACCEGLRCKLWCRKIIEEG

SEQ ID NO: 923 - protein, 31 aa, Artificial Sequence; identical to SEQ ID NO: 909
  source: /note="Description of Artificial Sequence: Synthetic polypeptide"
  source: /note="N-term Amino group"
  MOD_RES (1)..(1): CyA
  MOD_RES (7)..(7): Nle
  MOD_RES (18)..(18): Pra
  MOD_RES (25)..(25): 5-Br-Trp
  source: /note="C-term FreeAcid"

SEQ ID NO: 924 - protein, 32 aa, Artificial Sequence; identical to SEQ ID NO: 833
  source: /note="Description of Artificial Sequence: Synthetic polypeptide"
  source: /note="N-term Amino group"
  MOD_RES (1)..(1): CyA
  MOD_RES (7)..(7): Nle
  MOD_RES (18)..(18): Pra
  MOD_RES (25)..(25): 5-Br-Trp
  source: /note="C-term FreeAcid"

SEQ ID NO: 925 - protein, 33 aa, Artificial Sequence; identical to SEQ ID NO: 831
  source: /note="Description of Artificial Sequence: Synthetic polypeptide"
  source: /note="N-term Amino group"
  MOD_RES (1)..(1): CyA
  MOD_RES (7)..(7): Nle
  MOD_RES (18)..(18): Pra
  MOD_RES (25)..(25): 5-Br-Trp
  source: /note="C-term FreeAcid"

SEQ ID NO: 926 - protein, 32 aa, Artificial Sequence; identical to SEQ ID NO: 834
  source: /note="Description of Artificial Sequence: Synthetic polypeptide"
  source: /note="N-term Amino group"
  MOD_RES (1)..(1): CyA
  MOD_RES (7)..(7): Nle
  MOD_RES (18)..(18): Pra
  MOD_RES (25)..(25): 5-Br-Trp
  source: /note="C-term FreeAcid"

SEQ ID NO: 927 - protein, 33 aa, Artificial Sequence; identical to SEQ ID NO: 832
  source: /note="Description of Artificial Sequence: Synthetic polypeptide"
  source: /note="N-term Amino group"
  MOD_RES (1)..(1): CyA
  MOD_RES (7)..(7): Nle
  MOD_RES (18)..(18): Pra
  MOD_RES (25)..(25): 5-Br-Trp
  source: /note="C-term FreeAcid"

SEQ ID NO: 928 - protein, 30 aa, Artificial Sequence; identical to SEQ ID NO: 910
  source: /note="Description of Artificial Sequence: Synthetic polypeptide"
  source: /note="N-term Amino group"
  MOD_RES (1)..(1): CyA
  MOD_RES (7)..(7): Nle
  MOD_RES (18)..(18): Pra
  MOD_RES (25)..(25): 5-Br-Trp
  source: /note="C-term FreeAcid"

SEQ ID NO: 929 - protein, 31 aa, Artificial Sequence; identical to SEQ ID NO: 911
  source: /note="Description of Artificial Sequence: Synthetic polypeptide"
  source: /note="N-term Amino group"
  MOD_RES (1)..(1): Pra
  MOD_RES (7)..(7): Nle
  MOD_RES (25)..(25): 5-Br-Trp
  source: /note="C-term FreeAcid"

SEQ ID NO: 930 - protein, 32 aa, Artificial Sequence; identical to SEQ ID NO: 912
  source: /note="Description of Artificial Sequence: Synthetic polypeptide"
  source: /note="N-term Amino group"
  MOD_RES (1)..(1): Pra
  MOD_RES (7)..(7): Nle
  MOD_RES (25)..(25): 5-Br-Trp
  source: /note="C-term FreeAcid"

SEQ ID NO: 931 - protein, 33 aa, Artificial Sequence; identical to SEQ ID NO: 913
  source: /note="Description of Artificial Sequence: Synthetic polypeptide"
  source: /note="N-term Amino group"
  MOD_RES (1)..(1): Pra
  MOD_RES (7)..(7): Nle
  MOD_RES (25)..(25): 5-Br-Trp
  source: /note="C-term FreeAcid"

SEQ ID NO: 932 - protein, 32 aa, Artificial Sequence; identical to SEQ ID NO: 914
  source: /note="Description of Artificial Sequence: Synthetic polypeptide"
  source: /note="N-term Amino group"
  MOD_RES (1)..(1): Pra
  MOD_RES (7)..(7): Nle
  MOD_RES (25)..(25): 5-Br-Trp
  source: /note="C-term FreeAcid"

SEQ ID NO: 933 - protein, 33 aa, Artificial Sequence; identical to SEQ ID NO: 915
  source: /note="Description of Artificial Sequence: Synthetic polypeptide"
  source: /note="N-term Amino group"
  MOD_RES (1)..(1): Pra
  MOD_RES (7)..(7): Nle
  MOD_RES (25)..(25): 5-Br-Trp
  source: /note="C-term FreeAcid"

SEQ ID NO: 934 - protein, 30 aa, Artificial Sequence; identical to SEQ ID NO: 916
  source: /note="Description of Artificial Sequence: Synthetic polypeptide"
  source: /note="N-term Amino group"
  MOD_RES (1)..(1): Pra
  MOD_RES (7)..(7): Nle
  MOD_RES (25)..(25): 5-Br-Trp
  source: /note="C-term FreeAcid"

SEQ ID NO: 935 - protein, 31 aa, Artificial Sequence; identical to SEQ ID NO: 917
  source: /note="Description of Artificial Sequence: Synthetic polypeptide"
  source: /note="N-term Amino group"
  MOD_RES (1)..(1): CyA
  MOD_RES (7)..(7): Nle
  MOD_RES (18)..(18): Pra
  MOD_RES (25)..(25): 5-Br-Trp
  source: /note="C-term FreeAcid"

SEQ ID NO: 936 - protein, 32 aa, Artificial Sequence; identical to SEQ ID NO: 918
  source: /note="Description of Artificial Sequence: Synthetic polypeptide"
  source: /note="N-term Amino group"
  MOD_RES (1)..(1): CyA
  MOD_RES (7)..(7): Nle
  MOD_RES (18)..(18): Pra
  MOD_RES (25)..(25): 5-Br-Trp
  source: /note="C-term FreeAcid"

SEQ ID NO: 937 - protein, 33 aa, Artificial Sequence; identical to SEQ ID NO: 919
  source: /note="Description of Artificial Sequence: Synthetic polypeptide"
  source: /note="N-term Amino group"
  MOD_RES (1)..(1): CyA
  MOD_RES (7)..(7): Nle
  MOD_RES (18)..(18): Pra
  MOD_RES (25)..(25): 5-Br-Trp
  source: /note="C-term FreeAcid"

SEQ ID NO: 938 - protein, 31 aa, Artificial Sequence; identical to SEQ ID NO: 920
  source: /note="Description of Artificial Sequence: Synthetic polypeptide"
  source: /note="N-term Amino group"
  MOD_RES (1)..(1): Pra
  MOD_RES (7)..(7): Nle
  MOD_RES (25)..(25): 5-Br-Trp
  source: /note="C-term FreeAcid"

SEQ ID NO: 939 - protein, 32 aa, Artificial Sequence; identical to SEQ ID NO: 921
  source: /note="Description of Artificial Sequence: Synthetic polypeptide"
  source: /note="N-term Amino group"
  MOD_RES (1)..(1): Pra
  MOD_RES (7)..(7): Nle
  MOD_RES (25)..(25): 5-Br-Trp
  source: /note="C-term FreeAcid"

SEQ ID NO: 940 - protein, 33 aa, Artificial Sequence; identical to SEQ ID NO: 922
  source: /note="Description of Artificial Sequence: Synthetic polypeptide"
  source: /note="N-term Amino group"
  MOD_RES (1)..(1): Pra
  MOD_RES (7)..(7): Nle
  MOD_RES (25)..(25): 5-Br-Trp
  source: /note="C-term FreeAcid"

SEQ ID NO: 941 - protein, 30 aa, Artificial Sequence
  source: /note="Description of Artificial Sequence: Synthetic polypeptide"
  source: /note="N-term Amino group"
  MOD_RES (1)..(1): CyA
  MOD_RES (7)..(7): Nle
  MOD_RES (18)..(18): Pra
  source: /note="C-term Amide"
AECQKWLWTCDSARACCGGLRCKLWCRKEI

SEQ ID NO: 942 - protein, 30 aa, Artificial Sequence
  source: /note="Description of Artificial Sequence: Synthetic polypeptide"
  source: /note="N-term Amino group"
  MOD_RES (1)..(1): CyA
  MOD_RES (7)..(7): Nle
  MOD_RES (18)..(18): Pra
  source: /note="C-term Amide"
AECQKWLWTCDSKRACCGDLRCKLWCRKEI

SEQ ID NO: 943 - protein, 30 aa, Artificial Sequence
  source: /note="Description of Artificial Sequence: Synthetic polypeptide"
  source: /note="N-term Amino group"
  MOD_RES (1)..(1): CyA
  MOD_RES (7)..(7): Nle
  MOD_RES (18)..(18): Pra
  source: /note="C-term Amide"
AECQKWLWTCDSKRACCGGLVCKLWCRKEI

SEQ ID NO: 944 - protein, 30 aa, Artificial Sequence
  source: /note="Description of Artificial Sequence: Synthetic polypeptide"
  source: /note="N-term Amino group"
  MOD_RES (1)..(1): CyA
  MOD_RES (7)..(7): Nle
  MOD_RES (18)..(18): Pra
  source: /note="C-term Amide"
AECQKWLWTCDSKRACCGGLRCQLWCRKEI

SEQ ID NO: 945 - protein, 30 aa, Artificial Sequence
  source: /note="Description of Artificial Sequence: Synthetic polypeptide"
  source: /note="N-term Amino group"
  MOD_RES (1)..(1): CyA
  MOD_RES (7)..(7): Nle
  MOD_RES (18)..(18): Pra
  source: /note="C-term Amide"
AECQKWLWTCDSKRACCGGLRCKLWCRYEI

SEQ ID NO: 946 - protein, 30 aa, Artificial Sequence
  source: /note="Description of Artificial Sequence: Synthetic polypeptide"
  source: /note="N-term Amino group"
  MOD_RES (1)..(1): CyA
  MOD_RES (7)..(7): Nle
  MOD_RES (18)..(18): Pra
  source: /note="C-term Amide"
AECQKWLWTCDSKRACCGGLRCKLWCRLEI

SEQ ID NO: 947 - protein, 30 aa, Artificial Sequence
  source: /note="Description of Artificial Sequence: Synthetic polypeptide"
  source: /note="N-term Amino group"
  MOD_RES (1)..(1): CyA
  MOD_RES (7)..(7): Nle
  MOD_RES (18)..(18): Pra
  source: /note="C-term Amide"
AYCQKWLWTCDEARACCGGLRCKLWCRKEI

SEQ ID NO: 948 - protein, 30 aa, Artificial Sequence
  source: /note="Description of Artificial Sequence: Synthetic polypeptide"
  source: /note="N-term Amino group"
  MOD_RES (1)..(1): CyA
  MOD_RES (7)..(7): Nle
  MOD_RES (18)..(18): Pra
  source: /note="C-term Amide"
AYCQKWLWTCDEKRACCGDLRCKLWCRKEI

SEQ ID NO: 949 - protein, 30 aa, Artificial Sequence
  source: /note="Description of Artificial Sequence: Synthetic polypeptide"
  source: /note="N-term Amino group"
  MOD_RES (1)..(1): CyA
  MOD_RES (7)..(7): Nle
  MOD_RES (18)..(18): Pra
  source: /note="C-term Amide"
AYCQKWLWTCDEKRACCGGLVCKLWCRKEI

SEQ ID NO: 950 - protein, 30 aa, Artificial Sequence
  source: /note="Description of Artificial Sequence: Synthetic polypeptide"
  source: /note="N-term Amino group"
  MOD_RES (1)..(1): CyA
  MOD_RES (7)..(7): Nle
  MOD_RES (18)..(18): Pra
  source: /note="C-term Amide"
AYCQKWLWTCDEKRACCGGLRCQLWCRKEI

SEQ ID NO: 951 - protein, 30 aa, Artificial Sequence
  source: /note="Description of Artificial Sequence: Synthetic polypeptide"
  source: /note="N-term Amino group"
  MOD_RES (1)..(1): CyA
  MOD_RES (7)..(7): Nle
  MOD_RES (18)..(18): Pra
  source: /note="C-term Amide"
AYCQKWLWTCDEKRACCGGLRCKLWCRYEI

SEQ ID NO: 952 - protein, 30 aa, Artificial Sequence
  source: /note="Description of Artificial Sequence: Synthetic polypeptide"
  source: /note="N-term Amino group"
  MOD_RES (1)..(1): CyA
  MOD_RES (7)..(7): Nle
  MOD_RES (18)..(18): Pra
  source: /note="C-term Amide"
AYCQKWLWTCDEKRACCGGLRCKLWCRLEI

SEQ ID NO: 953 - protein, 30 aa, Artificial Sequence
  source: /note="Description of Artificial Sequence: Synthetic polypeptide"
  source: /note="N-term Amino group"
  MOD_RES (1)..(1): CyA
  MOD_RES (7)..(7): Nle
  MOD_RES (18)..(18): Pra
  source: /note="C-term Amide"
AYCQKWLWTCDSERACCGDLRCKLWCRKEI

SEQ ID NO: 954 - protein, 30 aa, Artificial Sequence
  source: /note="Description of Artificial Sequence: Synthetic polypeptide"
  source: /note="N-term Amino group"
  MOD_RES (1)..(1): CyA
  MOD_RES (7)..(7): Nle
  MOD_RES (18)..(18): Pra
  source: /note="C-term Amide"
AYCQKWLWTCDSERACCGGLVCKLWCRKEI

SEQ ID NO: 955 - protein, 30 aa, Artificial Sequence
  source: /note="Description of Artificial Sequence: Synthetic polypeptide"
  source: /note="N-term Amino group"
  MOD_RES (1)..(1): CyA
  MOD_RES (7)..(7): Nle
  MOD_RES (18)..(18): Pra
  source: /note="C-term Amide"
AYCQKWLWTCDSERACCGGLRCQLWCRKEI

SEQ ID NO: 956 - protein, 30 aa, Artificial Sequence
  source: /note="Description of Artificial Sequence: Synthetic polypeptide"
  source: /note="N-term Amino group"
  MOD_RES (1)..(1): CyA
  MOD_RES (7)..(7): Nle
  MOD_RES (18)..(18): Pra
  source: /note="C-term Amide"
AYCQKWLWTCDSERACCGGLRCKLWCRYEI

SEQ ID NO: 957 - protein, 30 aa, Artificial Sequence
  source: /note="Description of Artificial Sequence: Synthetic polypeptide"
  source: /note="N-term Amino group"
  MOD_RES (1)..(1): CyA
  MOD_RES (7)..(7): Nle
  MOD_RES (18)..(18): Pra
  source: /note="C-term Amide"
AYCQKWLWTCDSERACCGGLRCKLWCRLEI

SEQ ID NO: 958 - protein, 30 aa, Artificial Sequence
  source: /note="Description of Artificial Sequence: Synthetic polypeptide"
  source: /note="N-term Amino group"
  MOD_RES (1)..(1): CyA
  MOD_RES (7)..(7): Nle
  MOD_RES (18)..(18): Pra
  source: /note="C-term Amide"
AYCQKWLWTCDSARECCGGLRCKLWCRKEI

SEQ ID NO: 959 - protein, 30 aa, Artificial Sequence
  source: /note="Description of Artificial Sequence: Synthetic polypeptide"
  source: /note="N-term Amino group"
  MOD_RES (1)..(1): CyA
  MOD_RES (7)..(7): Nle
  MOD_RES (18)..(18): Pra
  source: /note="C-term Amide"
AYCQKWLWTCDSKRECCGDLRCKLWCRKEI

SEQ ID NO: 960 - protein, 30 aa, Artificial Sequence
  source: /note="Description of Artificial Sequence: Synthetic polypeptide"
  source: /note="N-term Amino group"
  MOD_RES (1)..(1): CyA
  MOD_RES (7)..(7): Nle
  MOD_RES (18)..(18): Pra
  source: /note="C-term Amide"
AYCQKWLWTCDSKRECCGGLVCKLWCRKEI

SEQ ID NO: 961 - protein, 30 aa, Artificial Sequence
  source: /note="Description of Artificial Sequence: Synthetic polypeptide"
  source: /note="N-term Amino group"
  MOD_RES (1)..(1): CyA
  MOD_RES (7)..(7): Nle
  MOD_RES (18)..(18): Pra
  source: /note="C-term Amide"
AYCQKWLWTCDSKRECCGGLRCQLWCRKEI

SEQ ID NO: 962 - protein, 30 aa, Artificial Sequence
  source: /note="Description of Artificial Sequence: Synthetic polypeptide"
  source: /note="N-term Amino group"
  MOD_RES (1)..(1): CyA
  MOD_RES (7)..(7): Nle
  MOD_RES (18)..(18): Pra
  source: /note="C-term Amide"
AYCQKWLWTCDSKRECCGGLRCKLWCRYEI

SEQ ID NO: 963 - protein, 30 aa, Artificial Sequence
  source: /note="Description of Artificial Sequence: Synthetic polypeptide"
  source: /note="N-term Amino group"
  MOD_RES (1)..(1): CyA
  MOD_RES (7)..(7): Nle
  MOD_RES (18)..(18): Pra
  source: /note="C-term Amide"
AYCQKWLWTCDSKRECCGGLRCKLWCRLEI

SEQ ID NO: 964 - protein, 30 aa, Artificial Sequence
  source: /note="Description of Artificial Sequence: Synthetic polypeptide"
  source: /note="N-term Amino group"
  MOD_RES (1)..(1): CyA
  MOD_RES (7)..(7): Nle
  MOD_RES (18)..(18): Pra
  source: /note="C-term Amide"
AYCQKWLWTCDSARACCGGLVCKLWCRKEI

SEQ ID NO: 965 - protein, 30 aa, Artificial Sequence
  source: /note="Description of Artificial Sequence: Synthetic polypeptide"
  source: /note="N-term Amino group"
  MOD_RES (1)..(1): CyA
  MOD_RES (7)..(7): Nle
  MOD_RES (18)..(18): Pra
  source: /note="C-term Amide"
AYCQKWLWTCDSKRACCGDLVCKLWCRKEI

SEQ ID NO: 966 - protein, 30 aa, Artificial Sequence
  source: /note="Description of Artificial Sequence: Synthetic polypeptide"
  source: /note="N-term Amino group"
  MOD_RES (1)..(1): CyA
  MOD_RES (7)..(7): Nle
  MOD_RES (18)..(18): Pra
  source: /note="C-term Amide"
AYCQKWLWTCDSKRACCGGLVCQLWCRKEI

SEQ ID NO: 967 - protein, 30 aa, Artificial Sequence
  source: /note="Description of Artificial Sequence: Synthetic polypeptide"
  source: /note="N-term Amino group"
  MOD_RES (1)..(1): CyA
  MOD_RES (7)..(7): Nle
  MOD_RES (18)..(18): Pra
  source: /note="C-term Amide"
AYCQKWLWTCDSKRACCGGLVCKLWCRYEI

SEQ ID NO: 968 - protein, 30 aa, Artificial Sequence
  source: /note="Description of Artificial Sequence: Synthetic polypeptide"
  source: /note="N-term Amino group"
  MOD_RES (1)..(1): CyA
  MOD_RES (7)..(7): Nle
  MOD_RES (18)..(18): Pra
  source: /note="C-term Amide"
AYCQKWLWTCDSKRACCGGLVCKLWCRLEI

SEQ ID NO: 969 - protein, 30 aa, Artificial Sequence
  source: /note="Description of Artificial Sequence: Synthetic polypeptide"
  source: /note="N-term Amino group"
  MOD_RES (1)..(1): CyA
  MOD_RES (7)..(7): Nle
  MOD_RES (18)..(18): Pra
  source: /note="C-term Amide"
AYCQKWLWTCDEERACCGGLRCKLWCRKEI

SEQ ID NO: 970 - protein, 30 aa, Artificial Sequence
  source: /note="Description of Artificial Sequence: Synthetic polypeptide"
  source: /note="N-term Amino group"
  MOD_RES (1)..(1): CyA
  MOD_RES (7)..(7): Nle
  MOD_RES (18)..(18): Pra
  source: /note="C-term Amide"
AYCQKWLWTCDEERACCGDLRCKLWCRKEI

SEQ ID NO: 971 - protein, 30 aa, Artificial Sequence
  source: /note="Description of Artificial Sequence: Synthetic polypeptide"
  source: /note="N-term Amino group"
  MOD_RES (1)..(1): CyA
  MOD_RES (7)..(7): Nle
  MOD_RES (18)..(18): Pra
  source: /note="C-term Amide"
AYCQKWLWTCDEERACCGGLVCKLWCRKEI

SEQ ID NO: 972 - protein, 30 aa, Artificial Sequence
  source: /note="Description of Artificial Sequence: Synthetic polypeptide"
  source: /note="N-term Amino group"
  MOD_RES (1)..(1): CyA
  MOD_RES (7)..(7): Nle
  MOD_RES (18)..(18): Pra
  source: /note="C-term Amide"
AYCQKWLWTCDEERACCGGLRCQLWCRKEI

SEQ ID NO: 973 - protein, 30 aa, Artificial Sequence
  source: /note="Description of Artificial Sequence: Synthetic polypeptide"
  source: /note="N-term Amino group"
  MOD_RES (1)..(1): CyA
  MOD_RES (7)..(7): Nle
  MOD_RES (18)..(18): Pra
  source: /note="C-term Amide"
AYCQKWLWTCDEERACCGGLRCKLWCRYEI

SEQ ID NO: 974 - protein, 30 aa, Artificial Sequence
  source: /note="Description of Artificial Sequence: Synthetic polypeptide"
  source: /note="N-term Amino group"
  MOD_RES (1)..(1): CyA
  MOD_RES (7)..(7): Nle
  MOD_RES (18)..(18): Pra
  source: /note="C-term Amide"
AYCQKWLWTCDEERACCGGLRCKLWCRLEI

SEQ ID NO: 975 - protein, 30 aa, Artificial Sequence
  source: /note="Description of Artificial Sequence: Synthetic polypeptide"
  source: /note="N-term Amino group"
  MOD_RES (1)..(1): CyA
  MOD_RES (7)..(7): Nle
  MOD_RES (18)..(18): Pra
  source: /note="C-term Amide"
AYCQKWLWTCDEERACCGGLVCQLWCRKEI

SEQ ID NO: 976 - protein, 30 aa, Artificial Sequence
  source: /note="Description of Artificial Sequence: Synthetic polypeptide"
  source: /note="N-term Amino group"
  MOD_RES (1)..(1): CyA
  MOD_RES (7)..(7): Nle
  MOD_RES (18)..(18): Pra
  source: /note="C-term Amide"
AYCQKWLWTCDEERACCGGLVCKLWCRYEI

SEQ ID NO: 977 - protein, 30 aa, Artificial Sequence
  source: /note="Description of Artificial Sequence: Synthetic polypeptide"
  source: /note="N-term Amino group"
  MOD_RES (1)..(1): CyA
  MOD_RES (7)..(7): Nle
  MOD_RES (18)..(18): Pra
  source: /note="C-term Amide"
AYCQKWLWTCDEERACCGGLVCKLWCRLEI

SEQ ID NO: 978 - protein, 30 aa, Artificial Sequence
  source: /note="Description of Artificial Sequence: Synthetic polypeptide"
  source: /note="N-term Amino group"
  MOD_RES (1)..(1): CyA
  MOD_RES (7)..(7): Nle
  MOD_RES (18)..(18): Pra
  source: /note="C-term Amide"
AYCQKWLWTCDSERACCGELVCKLWCRKEI

SEQ ID NO: 979 - protein, 30 aa, Artificial Sequence
  source: /note="Description of Artificial Sequence: Synthetic polypeptide"
  source: /note="N-term Amino group"
  MOD_RES (1)..(1): CyA
  MOD_RES (7)..(7): Nle
  MOD_RES (18)..(18): Pra
  source: /note="C-term Amide"
AYCQKWLWTCDSERACCGELRCQLWCRKEI

SEQ ID NO: 980 - protein, 30 aa, Artificial Sequence
  source: /note="Description of Artificial Sequence: Synthetic polypeptide"
  source: /note="N-term Amino group"
  MOD_RES (1)..(1): CyA
  MOD_RES (7)..(7): Nle
  MOD_RES (18)..(18): Pra
  source: /note="C-term Amide"
AYCQKWLWTCDSERACCGELRCKLWCRYEI

SEQ ID NO: 981 - protein, 30 aa, Artificial Sequence
  source: /note="Description of Artificial Sequence: Synthetic polypeptide"
  source: /note="N-term Amino group"
  MOD_RES (1)..(1): CyA
  MOD_RES (7)..(7): Nle
  MOD_RES (18)..(18): Pra
  source: /note="C-term Amide"
AYCQKWLWTCDSERACCGELRCKLWCRLEI

SEQ ID NO: 982 - protein, 30 aa, Artificial Sequence
  source: /note="Description of Artificial Sequence: Synthetic polypeptide"
  source: /note="N-term Amino group"
  MOD_RES (1)..(1): CyA
  MOD_RES (7)..(7): Nle
  MOD_RES (18)..(18): Pra
  source: /note="C-term Amide"
AYCQKWLWTCDSERACCGELVCQLWCRKEI

SEQ ID NO: 983 - protein, 30 aa, Artificial Sequence
  source: /note="Description of Artificial Sequence: Synthetic polypeptide"
  source: /note="N-term Amino group"
  MOD_RES (1)..(1): CyA
  MOD_RES (7)..(7): Nle
  MOD_RES (18)..(18): Pra
  source: /note="C-term Amide"
AYCQKWLWTCDSERACCGELVCKLWCRYEI

SEQ ID NO: 984 - protein, 30 aa, Artificial Sequence
  source: /note="Description of Artificial Sequence: Synthetic polypeptide"
  source: /note="N-term Amino group"
  MOD_RES (1)..(1): CyA
  MOD_RES (7)..(7): Nle
  MOD_RES (18)..(18): Pra
  source: /note="C-term Amide"
AYCQKWLWTCDSERACCGELVCKLWCRLEI

SEQ ID NO: 985 - protein, 30 aa, Artificial Sequence
  source: /note="Description of Artificial Sequence: Synthetic polypeptide"
  source: /note="N-term Amino group"
  MOD_RES (1)..(1): CyA
  MOD_RES (7)..(7): Nle
  MOD_RES (18)..(18): Pra
  source: /note="C-term Amide"
AYCQKWLWTCDSKRACCGGLRCKLWCRYNL

SEQ ID NO: 986 - protein, 30 aa, Artificial Sequence
  source: /note="Description of Artificial Sequence: Synthetic polypeptide"
  source: /note="N-term Amino group"
  MOD_RES (1)..(1): Pra
  MOD_RES (7)..(7): Nle
  source: /note="C-term Amide"
GYCQKWLWTCDSARACCEGLRCKLWCRKEI

SEQ ID NO: 987 - protein, 30 aa, Artificial Sequence
  source: /note="Description of Artificial Sequence: Synthetic polypeptide"
  source: /note="N-term Amino group"
  MOD_RES (1)..(1): Pra
  MOD_RES (7)..(7): Nle
  source: /note="C-term Amide"
GYCQKWLWTCDSKRACCEDLRCKLWCRKEI

SEQ ID NO: 988 - protein, 30 aa, Artificial Sequence
  source: /note="Description of Artificial Sequence: Synthetic polypeptide"
  source: /note="N-term Amino group"
  MOD_RES (1)..(1): Pra
  MOD_RES (7)..(7): Nle
  source: /note="C-term Amide"
GYCQKWLWTCDSKRACCEGLRCKLWCRYEI

SEQ ID NO: 989 - protein, 30 aa, Artificial Sequence
  source: /note="Description of Artificial Sequence: Synthetic polypeptide"
  source: /note="N-term Amino group"
  MOD_RES (1)..(1): Pra
  MOD_RES (7)..(7): Nle
  source: /note="C-term Amide"
GYCQKWLWTCDSKRACCEGLRCKLWCRLEI

SEQ ID NO: 990 - protein, 30 aa, Artificial Sequence
  source: /note="Description of Artificial Sequence: Synthetic polypeptide"
  source: /note="N-term Amino group"
  MOD_RES (1)..(1): Pra
  MOD_RES (7)..(7): Nle
  source: /note="C-term Amide"
GECQKWLWTCDSARACCEGLRCKLWCRKEI

SEQ ID NO: 991 - protein, 30 aa, Artificial Sequence
  source: /note="Description of Artificial Sequence: Synthetic polypeptide"
  source: /note="N-term Amino group"
  MOD_RES (1)..(1): Pra
  MOD_RES (7)..(7): Nle
  source: /note="C-term Amide"
GECQKWLWTCDSKRACCEDLRCKLWCRKEI

SEQ ID NO: 992 - protein, 30 aa, Artificial Sequence
  source: /note="Description of Artificial Sequence: Synthetic polypeptide"
  source: /note="N-term Amino group"
  MOD_RES (1)..(1): Pra
  MOD_RES (7)..(7): Nle
  source: /note="C-term Amide"
GECQKWLWTCDSKRACCEGLVCKLWCRKEI

SEQ ID NO: 993 - protein, 30 aa, Artificial Sequence
  source: /note="Description of Artificial Sequence: Synthetic polypeptide"
  source: /note="N-term Amino group"
  MOD_RES (1)..(1): Pra
  MOD_RES (7)..(7): Nle
  source: /note="C-term Amide"
GECQKWLWTCDSKRACCEGLRCQLWCRKEI

SEQ ID NO: 994 - protein, 30 aa, Artificial Sequence
  source: /note="Description of Artificial Sequence: Synthetic polypeptide"
  source: /note="N-term Amino group"
  MOD_RES (1)..(1): Pra
  MOD_RES (7)..(7): Nle
  source: /note="C-term Amide"
GECQKWLWTCDSKRACCEGLRCKLWCRYEI

SEQ ID NO: 995 - protein, 30 aa, Artificial Sequence
  source: /note="Description of Artificial Sequence: Synthetic polypeptide"
  source: /note="N-term Amino group"
  MOD_RES (1)..(1): Pra
  MOD_RES (7)..(7): Nle
  source: /note="C-term Amide"
GECQKWLWTCDSKRACCEGLRCKLWCRLEI

SEQ ID NO: 996 - protein, 30 aa, Artificial Sequence
  source: /note="Description of Artificial Sequence: Synthetic polypeptide"
  source: /note="N-term Amino group"
  MOD_RES (1)..(1): Pra
  MOD_RES (7)..(7): Nle
  source: /note="C-term Amide"
GYCQKWLWTCDEARACCEGLRCKLWCRKEI

SEQ ID NO: 997 - protein, 30 aa, Artificial Sequence
  source: /note="Description of Artificial Sequence: Synthetic polypeptide"
  source: /note="N-term Amino group"
  MOD_RES (1)..(1): Pra
  MOD_RES (7)..(7): Nle
  source: /note="C-term Amide"
GYCQKWLWTCDEKRACCEDLRCKLWCRKEI

SEQ ID NO: 998 - protein, 30 aa, Artificial Sequence
  source: /note="Description of Artificial Sequence: Synthetic polypeptide"
  source: /note="N-term Amino group"
  MOD_RES (1)..(1): Pra
  MOD_RES (7)..(7): Nle
  source: /note="C-term Amide"
GYCQKWLWTCDEKRACCEGLVCKLWCRKEI

SEQ ID NO: 999 - protein, 30 aa, Artificial Sequence
  source: /note="Description of Artificial Sequence: Synthetic polypeptide"
  source: /note="N-term Amino group"
  MOD_RES (1)..(1): Pra
  MOD_RES (7)..(7): Nle
  source: /note="C-term Amide"
GYCQKWLWTCDEKRACCEGLRCQLWCRKEI

SEQ ID NO: 1000 - protein, 30 aa, Artificial Sequence
  source: /note="Description of Artificial Sequence: Synthetic polypeptide"
  source: /note="N-term Amino group"
  MOD_RES (1)..(1): Pra
  MOD_RES (7)..(7): Nle
  source: /note="C-term Amide"
GYCQKWLWTCDEKRACCEGLRCKLWCRYEI

SEQ ID NO: 1001 - protein, 30 aa, Artificial Sequence
  source: /note="Description of Artificial Sequence: Synthetic polypeptide"
  source: /note="N-term Amino group"
  MOD_RES (1)..(1): Pra
  MOD_RES (7)..(7): Nle
  source: /note="C-term Amide"
GYCQKWLWTCDEKRACCEGLRCKLWCRLEI

SEQ ID NO: 1002 - protein, 30 aa, Artificial Sequence
  source: /note="Description of Artificial Sequence: Synthetic polypeptide"
  source: /note="N-term Amino group"
  MOD_RES (1)..(1): Pra
  MOD_RES (7)..(7): Nle
  source: /note="C-term Amide"
GYCQKWLWTCDSERACCEDLRCKLWCRKEI

SEQ ID NO: 1003 - protein, 30 aa, Artificial Sequence
  source: /note="Description of Artificial Sequence: Synthetic polypeptide"
  source: /note="N-term Amino group"
  MOD_RES (1)..(1): Pra
  MOD_RES (7)..(7): Nle
  source: /note="C-term Amide"
GYCQKWLWTCDSERACCEGLVCKLWCRKEI

SEQ ID NO: 1004 - protein, 30 aa, Artificial Sequence
  source: /note="Description of Artificial Sequence: Synthetic polypeptide"
  source: /note="N-term Amino group"
  MOD_RES (1)..(1): Pra
  MOD_RES (7)..(7): Nle
  source: /note="C-term Amide"
GYCQKWLWTCDSERACCEGLRCQLWCRKEI

SEQ ID NO: 1005 - protein, 30 aa, Artificial Sequence
  source: /note="Description of Artificial Sequence: Synthetic polypeptide"
  source: /note="N-term Amino group"
  MOD_RES (1)..(1): Pra
  MOD_RES (7)..(7): Nle
  source: /note="C-term Amide"
GYCQKWLWTCDSERACCEGLRCKLWCRYEI

SEQ ID NO: 1006 - protein, 30 aa, Artificial Sequence
  source: /note="Description of Artificial Sequence: Synthetic polypeptide"
  source: /note="N-term Amino group"
  MOD_RES (1)..(1): Pra
  MOD_RES (7)..(7): Nle
  source: /note="C-term Amide"
GYCQKWLWTCDSERACCEGLRCKLWCRLEI

SEQ ID NO: 1007 - protein, 30 aa, Artificial Sequence
  source: /note="Description of Artificial Sequence: Synthetic polypeptide"
  source: /note="N-term Amino group"
  MOD_RES (1)..(1): Pra
  MOD_RES (7)..(7): Nle
  source: /note="C-term Amide"
GYCQKWLWTCDSAEACCEGLRCKLWCRKEI

SEQ ID NO: 1008 - protein, 30 aa, Artificial Sequence
  source: /note="Description of Artificial Sequence: Synthetic polypeptide"
  source: /note="N-term Amino group"
  MOD_RES (1)..(1): Pra
  MOD_RES (7)..(7): Nle
  source: /note="C-term Amide"
GYCQKWLWTCDSKEACCEDLRCKLWCRKEI

SEQ ID NO: 1009 - protein, 30 aa, Artificial Sequence
  source: /note="Description of Artificial Sequence: Synthetic polypeptide"
  source: /note="N-term Amino group"
  MOD_RES (1)..(1): Pra
  MOD_RES (7)..(7): Nle
  source: /note="C-term Amide"
GYCQKWLWTCDSKEACCEGLVCKLWCRKEI

SEQ ID NO: 1010 - protein, 30 aa, Artificial Sequence
  source: /note="Description of Artificial Sequence: Synthetic polypeptide"
  source: /note="N-term Amino group"
  MOD_RES (1)..(1): Pra
  MOD_RES (7)..(7): Nle
  source: /note="C-term Amide"
GYCQKWLWTCDSKEACCEGLRCQLWCRKEI

SEQ ID NO: 1011 - protein, 30 aa, Artificial Sequence
  source: /note="Description of Artificial Sequence: Synthetic polypeptide"
  source: /note="N-term Amino group"
  MOD_RES (1)..(1): Pra
  MOD_RES (7)..(7): Nle
  source: /note="C-term Amide"
GYCQKWLWTCDSKEACCEGLRCKLWCRYEI

SEQ ID NO: 1012 - protein, 30 aa, Artificial Sequence
  source: /note="Description of Artificial Sequence: Synthetic polypeptide"
  source: /note="N-term Amino group"
  MOD_RES (1)..(1): Pra
  MOD_RES (7)..(7): Nle
  source: /note="C-term Amide"
GYCQKWLWTCDSKEACCEGLRCKLWCRLEI

SEQ ID NO: 1013 - protein, 30 aa, Artificial Sequence
  source: /note="Description of Artificial Sequence: Synthetic polypeptide"
  source: /note="N-term Amino group"
  MOD_RES (1)..(1): Pra
  MOD_RES (7)..(7): Nle
  source: /note="C-term Amide"
GYCQKWLWTCDSARACCEGLVCKLWCRKEI

SEQ ID NO: 1014 - protein, 30 aa, Artificial Sequence
  source: /note="Description of Artificial Sequence: Synthetic polypeptide"
  source: /note="N-term Amino group"
  MOD_RES (1)..(1): Pra
  MOD_RES (7)..(7): Nle
  source: /note="C-term Amide"
GYCQKWLWTCDSKRACCEDLVCKLWCRKEI

SEQ ID NO: 1015 - protein, 30 aa, Artificial Sequence
  source: /note="Description of Artificial Sequence: Synthetic polypeptide"
  source: /note="N-term Amino group"
  MOD_RES (1)..(1): Pra
  MOD_RES (7)..(7): Nle
  source: /note="C-term Amide"
GYCQKWLWTCDSKRACCEGLVCQLWCRKEI

SEQ ID NO: 1016 - protein, 30 aa, Artificial Sequence
  source: /note="Description of Artificial Sequence: Synthetic polypeptide"
  source: /note="N-term Amino group"
  MOD_RES (1)..(1): Pra
  MOD_RES (7)..(7): Nle
  source: /note="C-term Amide"
GYCQKWLWTCDSKRACCEGLVCKLWCRYEI

SEQ ID NO: 1017 - protein, 30 aa, Artificial Sequence
  source: /note="Description of Artificial Sequence: Synthetic polypeptide"
  source: /note="N-term Amino group"
  MOD_RES (1)..(1): Pra
  MOD_RES (7)..(7): Nle
  source: /note="C-term Amide"
GYCQKWLWTCDSKRACCEGLVCKLWCRLEI

SEQ ID NO: 1018 - protein, 30 aa, Artificial Sequence
  source: /note="Description of Artificial Sequence: Synthetic polypeptide"
  source: /note="N-term Amino group"
  MOD_RES (1)..(1): Pra
  MOD_RES (7)..(7): Nle
  source: /note="C-term Amide"
GYCQKWLWTCDEERACCEDLRCKLWCRKEI

SEQ ID NO: 1019 - protein, 30 aa, Artificial Sequence
  source: /note="Description of Artificial Sequence: Synthetic polypeptide"
  source: /note="N-term Amino group"
  MOD_RES (1)..(1): Pra
  MOD_RES (7)..(7): Nle
  source: /note="C-term Amide"
GYCQKWLWTCDEERACCEGLVCKLWCRKEI

SEQ ID NO: 1020 - protein, 30 aa, Artificial Sequence
  source: /note="Description of Artificial Sequence: Synthetic polypeptide"
  source: /note="N-term Amino group"
  MOD_RES (1)..(1): Pra
  MOD_RES (7)..(7): Nle
  source: /note="C-term Amide"
GYCQKWLWTCDEERACCEGLRCQLWCRKEI

SEQ ID NO: 1021 - protein, 30 aa, Artificial Sequence
  source: /note="Description of Artificial Sequence: Synthetic polypeptide"
  source: /note="N-term Amino group"
  MOD_RES (1)..(1): Pra
  MOD_RES (7)..(7): Nle
  source: /note="C-term Amide"
GYCQKWLWTCDEERACCEGLRCKLWCRYEI

SEQ ID NO: 1022 - protein, 30 aa, Artificial Sequence
  source: /note="Description of Artificial Sequence: Synthetic polypeptide"
  source: /note="N-term Amino group"
  MOD_RES (1)..(1): Pra
  MOD_RES (7)..(7): Nle
  source: /note="C-term Amide"
GYCQKWLWTCDEERACCEGLRCKLWCRLEI

SEQ ID NO: 1023 - protein, 30 aa, Artificial Sequence
  source: /note="Description of Artificial Sequence: Synthetic polypeptide"
  source: /note="N-term Amino group"
  MOD_RES (1)..(1): Pra
  MOD_RES (7)..(7): Nle
  source: /note="C-term Amide"
GYCQKWLWTCDEERACCEGLVCQLWCRKEI

SEQ ID NO: 1024 - protein, 30 aa, Artificial Sequence
  source: /note="Description of Artificial Sequence: Synthetic polypeptide"
  source: /note="N-term Amino group"
  MOD_RES (1)..(1): Pra
  MOD_RES (7)..(7): Nle
  source: /note="C-term Amide"
GYCQKWLWTCDEERACCEGLVCKLWCRYEI

SEQ ID NO: 1025 - protein, 30 aa, Artificial Sequence
  source: /note="Description of Artificial Sequence: Synthetic polypeptide"
  source: /note="N-term Amino group"
  MOD_RES (1)..(1): Pra
  MOD_RES (7)..(7): Nle
  source: /note="C-term Amide"
GYCQKWLWTCDEERACCEGLVCKLWCRLEI

SEQ ID NO: 1026 - protein, 30 aa, Artificial Sequence
  source: /note="Description of Artificial Sequence: Synthetic polypeptide"
  source: /note="N-term Amino group"
  MOD_RES (1)..(1): Pra
  MOD_RES (7)..(7): Nle
  source: /note="C-term Amide"
GYCQKWLWTCDSERACCEELVCKLWCRKEI

SEQ ID NO: 1027 - protein, 30 aa, Artificial Sequence
  source: /note="Description of Artificial Sequence: Synthetic polypeptide"
  source: /note="N-term Amino group"
  MOD_RES (1)..(1): Pra
  MOD_RES (7)..(7): Nle
  source: /note="C-term Amide"
GYCQKWLWTCDSERACCEELRCQLWCRKEI

SEQ ID NO: 1028 - protein, 30 aa, Artificial Sequence
  source: /note="Description of Artificial Sequence: Synthetic polypeptide"
  source: /note="N-term Amino group"
  MOD_RES (1)..(1): Pra
  MOD_RES (7)..(7): Nle
  source: /note="C-term Amide"
GYCQKWLWTCDSERACCEELRCKLWCRYEI

SEQ ID NO: 1029 - protein, 30 aa, Artificial Sequence
  source: /note="Description of Artificial Sequence: Synthetic polypeptide"
  source: /note="N-term Amino group"
  MOD_RES (1)..(1): Pra
  MOD_RES (7)..(7): Nle
  source: /note="C-term Amide"
GYCQKWLWTCDSERACCEELRCKLWCRLEI

SEQ ID NO: 1030 - protein, 30 aa, Artificial Sequence
  source: /note="Description of Artificial Sequence: Synthetic polypeptide"
  source: /note="N-term Amino group"
  MOD_RES (1)..(1): Pra
  MOD_RES (7)..(7): Nle
  source: /note="C-term Amide"
GYCQKWLWTCDSERACCEELVCQLWCRKEI

SEQ ID NO: 1031 - protein, 30 aa, Artificial Sequence
  source: /note="Description of Artificial Sequence: Synthetic polypeptide"
  source: /note="N-term Amino group"
  MOD_RES (1)..(1): Pra
  MOD_RES (7)..(7): Nle
  source: /note="C-term Amide"
GYCQKWLWTCDSERACCEELVCKLWCRYEI

SEQ ID NO: 1032 - protein, 30 aa, Artificial Sequence
  source: /note="Description of Artificial Sequence: Synthetic polypeptide"
  source: /note="N-term Amino group"
  MOD_RES (1)..(1): Pra
  MOD_RES (7)..(7): Nle
  source: /note="C-term Amide"
GYCQKWLWTCDSERACCEELVCKLWCRLEI

SEQ ID NO: 1033 - protein, 30 aa, Artificial Sequence
  source: /note="Description of Artificial Sequence: Synthetic polypeptide"
  source: /note="N-term Amino group"
  MOD_RES (1)..(1): Pra
  MOD_RES (7)..(7): Nle
  source: /note="C-term Amide"
GYCQKWLWTCDSKRACCEGLRCKLWCRYNL

SEQ ID NO: 1034 - protein, 30 aa, Artificial Sequence
  source: /note="Description of Artificial Sequence: Synthetic polypeptide"
  source: /note="N-term Amino group"
  MOD_RES (1)..(1): CyA
  MOD_RES (7)..(7): Nle
  MOD_RES (18)..(18): Pra
  source: /note="C-term Amide"
AYCQKWLWTCDEKRACCGGLRCKLWCRKII

SEQ ID NO: 1035 - protein, 30 aa, Artificial Sequence
  source: /note="Description of Artificial Sequence: Synthetic polypeptide"
  source: /note="N-term Amino group"
  MOD_RES (1)..(1): CyA
  MOD_RES (7)..(7): Nle
  MOD_RES (18)..(18): Pra
  source: /note="C-term Amide"
AYCQKWLWTCDSARACCGGLRCKLWCRKII

SEQ ID NO: 1036 - protein, 30 aa, Artificial Sequence
  source: /note="Description of Artificial Sequence: Synthetic polypeptide"
  source: /note="N-term Amino group"
  MOD_RES (1)..(1): CyA
  MOD_RES (7)..(7): Nle
  MOD_RES (18)..(18): Pra
  source: /note="C-term Amide"
AYCQKWLWTCDSKRACCGDLRCKLWCRKII

SEQ ID NO: 1037 - protein, 30 aa, Artificial Sequence
  source: /note="Description of Artificial Sequence: Synthetic polypeptide"
  source: /note="N-term Amino group"
  MOD_RES (1)..(1): CyA
  MOD_RES (7)..(7): Nle
  MOD_RES (18)..(18): Pra
  source: /note="C-term Amide"
AYCQKWLWTCDSKRACCGGLVCKLWCRKII

SEQ ID NO: 1038 - protein, 30 aa, Artificial Sequence
  source: /note="Description of Artificial Sequence: Synthetic polypeptide"
  source: /note="N-term Amino group"
  MOD_RES (1)..(1): CyA
  MOD_RES (7)..(7): Nle
  MOD_RES (18)..(18): Pra
  source: /note="C-term Amide"
AYCQKWLWTCDSKRACCGGLRCQLWCRKII

SEQ ID NO: 1039 - protein, 30 aa, Artificial Sequence
  source: /note="Description of Artificial Sequence: Synthetic polypeptide"
  source: /note="N-term Amino group"
  MOD_RES (1)..(1): CyA
  MOD_RES (7)..(7): Nle
  MOD_RES (18)..(18): Pra
  source: /note="C-term Amide"
AYCQKWLWTCDSKRACCGGLRCKLWCRYII

SEQ ID NO: 1040 - protein, 30 aa, Artificial Sequence
  source: /note="Description of Artificial Sequence: Synthetic polypeptide"
  source: /note="N-term Amino group"
  MOD_RES (1)..(1): CyA
  MOD_RES (7)..(7): Nle
  MOD_RES (18)..(18): Pra
  source: /note="C-term Amide"
AYCQKWLWTCDSKRACCGGLRCKLWCRLII

SEQ ID NO: 1041 - protein, 30 aa, Artificial Sequence
  source: /note="Description of Artificial Sequence: Synthetic polypeptide"
  source: /note="N-term Amino group"
  MOD_RES (1)..(1): CyA
  MOD_RES (7)..(7): Nle
  MOD_RES (18)..(18): Pra
  source: /note="C-term Amide"
AECQKWLWTCDSARACCGGLRCKLWCRKII

SEQ ID NO: 1042 - protein, 30 aa, Artificial Sequence
  source: /note="Description of Artificial Sequence: Synthetic polypeptide"
  source: /note="N-term Amino group"
  MOD_RES (1)..(1): CyA
  MOD_RES (7)..(7): Nle
  MOD_RES (18)..(18): Pra
  source: /note="C-term Amide"
AECQKWLWTCDSKRACCGDLRCKLWCRKII

SEQ ID NO: 1043 - protein, 30 aa, Artificial Sequence
  source: /note="Description of Artificial Sequence: Synthetic polypeptide"
  source: /note="N-term Amino group"
  MOD_RES (1)..(1): CyA
  MOD_RES (7)..(7): Nle
  MOD_RES (18)..(18): Pra
  source: /note="C-term Amide"
AECQKWLWTCDSKRACCGGLVCKLWCRKII

SEQ ID NO: 1044 - protein, 30 aa, Artificial Sequence
  source: /note="Description of Artificial Sequence: Synthetic polypeptide"
  source: /note="N-term Amino group"
  MOD_RES (1)..(1): CyA
  MOD_RES (7)..(7): Nle
  MOD_RES (18)..(18): Pra
  source: /note="C-term Amide"
AECQKWLWTCDSKRACCGGLRCQLWCRKII

SEQ ID NO: 1045 - protein, 30 aa, Artificial Sequence
  source: /note="Description of Artificial Sequence: Synthetic polypeptide"
  source: /note="N-term Amino group"
  MOD_RES (1)..(1): CyA
  MOD_RES (7)..(7): Nle
  MOD_RES (18)..(18): Pra
  source: /note="C-term Amide"
AECQKWLWTCDSKRACCGGLRCKLWCRYII

SEQ ID NO: 1046 - protein, 30 aa, Artificial Sequence
  source: /note="Description of Artificial Sequence: Synthetic polypeptide"
  source: /note="N-term Amino group"
  MOD_RES (1)..(1): CyA
  MOD_RES (7)..(7): Nle
  MOD_RES (18)..(18): Pra
  source: /note="C-term Amide"
AECQKWLWTCDSKRACCGGLRCKLWCRLII

SEQ ID NO: 1047 - protein, 30 aa, Artificial Sequence
  source: /note="Description of Artificial Sequence: Synthetic polypeptide"
  source: /note="N-term Amino group"
  MOD_RES (1)..(1): CyA
  MOD_RES (7)..(7): Nle
  MOD_RES (18)..(18): Pra
  source: /note="C-term Amide"
AYCQKWLWTCDEARACCGGLRCKLWCRKII

SEQ ID NO: 1048 - protein, 30 aa, Artificial Sequence
  source: /note="Description of Artificial Sequence: Synthetic polypeptide"
  source: /note="N-term Amino group"
  MOD_RES (1)..(1): CyA
  MOD_RES (7)..(7): Nle
  MOD_RES (18)..(18): Pra
  source: /note="C-term Amide"
AYCQKWLWTCDEKRACCGDLRCKLWCRKII

SEQ ID NO: 1049 - protein, 30 aa, Artificial Sequence
  source: /note="Description of Artificial Sequence: Synthetic polypeptide"
  source: /note="N-term Amino group"
  MOD_RES (1)..(1): CyA
  MOD_RES (7)..(7): Nle
  MOD_RES (18)..(18): Pra
  source: /note="C-term Amide"
AYCQKWLWTCDEKRACCGGLVCKLWCRKII

SEQ ID NO: 1050 - protein, 30 aa, Artificial Sequence
  source: /note="Description of Artificial Sequence: Synthetic polypeptide"
  source: /note="N-term Amino group"
  MOD_RES (1)..(1): CyA
  MOD_RES (7)..(7): Nle
  MOD_RES (18)..(18): Pra
  source: /note="C-term Amide"
AYCQKWLWTCDEKRACCGGLRCQLWCRKII

SEQ ID NO: 1051 - protein, 30 aa, Artificial Sequence
  source: /note="Description of Artificial Sequence: Synthetic polypeptide"
  source: /note="N-term Amino group"
  MOD_RES (1)..(1): CyA
  MOD_RES (7)..(7): Nle
  MOD_RES (18)..(18): Pra
  source: /note="C-term Amide"
AYCQKWLWTCDEKRACCGGLRCKLWCRYII

SEQ ID NO: 1052 - protein, 30 aa, Artificial Sequence
  source: /note="Description of Artificial Sequence: Synthetic polypeptide"
  source: /note="N-term Amino group"
  MOD_RES (1)..(1): CyA
  MOD_RES (7)..(7): Nle
  MOD_RES (18)..(18): Pra
  source: /note="C-term Amide"
AYCQKWLWTCDEKRACCGGLRCKLWCRLII

SEQ ID NO: 1053 - protein, 30 aa, Artificial Sequence
  source: /note="Description of Artificial Sequence: Synthetic polypeptide"
  source: /note="N-term Amino group"
  MOD_RES (1)..(1): CyA
  MOD_RES (7)..(7): Nle
  MOD_RES (18)..(18): Pra
  source: /note="C-term Amide"
AYCQKWLWTCDSERACCGDLRCKLWCRKII

SEQ ID NO: 1054 - protein, 30 aa, Artificial Sequence
  source: /note="Description of Artificial Sequence: Synthetic polypeptide"
  source: /note="N-term Amino group"
  MOD_RES (1)..(1): CyA
  MOD_RES (7)..(7): Nle
  MOD_RES (18)..(18): Pra
  source: /note="C-term Amide"
AYCQKWLWTCDSERACCGGLVCKLWCRKII

SEQ ID NO: 1055 - protein, 30 aa, Artificial Sequence
  source: /note="Description of Artificial Sequence: Synthetic polypeptide"
  source: /note="N-term Amino group"
  MOD_RES (1)..(1): CyA
  MOD_RES (7)..(7): Nle
  MOD_RES (18)..(18): Pra
  source: /note="C-term Amide"
AYCQKWLWTCDSERACCGGLRCQLWCRKII

SEQ ID NO: 1056 - protein, 30 aa, Artificial Sequence
  source: /note="Description of Artificial Sequence: Synthetic polypeptide"
  source: /note="N-term Amino group"
  MOD_RES (1)..(1): CyA
  MOD_RES (7)..(7): Nle
  MOD_RES (18)..(18): Pra
  source: /note="C-term Amide"
AYCQKWLWTCDSERACCGGLRCKLWCRYII

SEQ ID NO: 1057 - protein, 30 aa, Artificial Sequence
  source: /note="Description of Artificial Sequence: Synthetic polypeptide"
  source: /note="N-term Amino group"
  MOD_RES (1)..(1): CyA
  MOD_RES (7)..(7): Nle
  MOD_RES (18)..(18): Pra
  source: /note="C-term Amide"
AYCQKWLWTCDSERACCGGLRCKLWCRLII

SEQ ID NO: 1058 - protein, 30 aa, Artificial Sequence
  source: /note="Description of Artificial Sequence: Synthetic polypeptide"
  source: /note="N-term Amino group"
  MOD_RES (1)..(1): CyA
  MOD_RES (7)..(7): Nle
  MOD_RES (18)..(18): Pra
  source: /note="C-term Amide"
AYCQKWLWTCDSARECCGGLRCKLWCRKII

SEQ ID NO: 1059 - protein, 30 aa, Artificial Sequence
  source: /note="Description of Artificial Sequence: Synthetic polypeptide"
  source: /note="N-term Amino group"
  MOD_RES (1)..(1): CyA
  MOD_RES (7)..(7): Nle
  MOD_RES (18)..(18): Pra
  source: /note="C-term Amide"
AYCQKWLWTCDSKRECCGDLRCKLWCRKII

SEQ ID NO: 1060 - protein, 30 aa, Artificial Sequence
  source: /note="Description of Artificial Sequence: Synthetic polypeptide"
  source: /note="N-term Amino group"
  MOD_RES (1)..(1): CyA
  MOD_RES (7)..(7): Nle
  MOD_RES (18)..(18): Pra
  source: /note="C-term Amide"
AYCQKWLWTCDSKRECCGGLVCKLWCRKII

SEQ ID NO: 1061 - protein, 30 aa, Artificial Sequence
  source: /note="Description of Artificial Sequence: Synthetic polypeptide"
  source: /note="N-term Amino group"
  MOD_RES (1)..(1): CyA
  MOD_RES (7)..(7): Nle
  MOD_RES (18)..(18): Pra
  source: /note="C-term Amide"
AYCQKWLWTCDSKRECCGGLRCQLWCRKII

SEQ ID NO: 1062 - protein, 30 aa, Artificial Sequence
  source: /note="Description of Artificial Sequence: Synthetic polypeptide"
  source: /note="N-term Amino group"
  MOD_RES (1)..(1): CyA
  MOD_RES (7)..(7): Nle
  MOD_RES (18)..(18): Pra
  source: /note="C-term Amide"
AYCQKWLWTCDSKRECCGGLRCKLWCRYII

SEQ ID NO: 1063 - protein, 30 aa, Artificial Sequence
  source: /note="Description of Artificial Sequence: Synthetic polypeptide"
  source: /note="N-term Amino group"
  MOD_RES (1)..(1): CyA
  MOD_RES (7)..(7): Nle
  MOD_RES (18)..(18): Pra
  source: /note="C-term Amide"
AYCQKWLWTCDSKRECCGGLRCKLWCRLII

SEQ ID NO: 1064 - protein, 30 aa, Artificial Sequence
  source: /note="Description of Artificial Sequence: Synthetic polypeptide"
  source: /note="N-term Amino group"
  MOD_RES (1)..(1): CyA
  MOD_RES (7)..(7): Nle
  MOD_RES (18)..(18): Pra
  source: /note="C-term Amide"
AYCQKWLWTCDSARACCGGLVCKLWCRKII

SEQ ID NO: 1065 - protein, 30 aa, Artificial Sequence
  source: /note="Description of Artificial Sequence: Synthetic polypeptide"
  source: /note="N-term Amino group"
  MOD_RES (1)..(1): CyA
  MOD_RES (7)..(7): Nle
  MOD_RES (18)..(18): Pra
  source: /note="C-term Amide"
AYCQKWLWTCDSKRACCGDLVCKLWCRKII

SEQ ID NO: 1066 - protein, 30 aa, Artificial Sequence
  source: /note="Description of Artificial Sequence: Synthetic polypeptide"
  source: /note="N-term Amino group"
  MOD_RES (1)..(1): CyA
  MOD_RES (7)..(7): Nle
  MOD_RES (18)..(18): Pra
  source: /note="C-term Amide"
AYCQKWLWTCDSKRACCGGLVCQLWCRKII

SEQ ID NO: 1067 - protein, 30 aa, Artificial Sequence
  source: /note="Description of Artificial Sequence: Synthetic polypeptide"
  source: /note="N-term Amino group"
  MOD_RES (1)..(1): CyA
  MOD_RES (7)..(7): Nle
  MOD_RES (18)..(18): Pra
  source: /note="C-term Amide"
AYCQKWLWTCDSKRACCGGLVCKLWCRYII

SEQ ID NO: 1068 - protein, 30 aa, Artificial Sequence
  source: /note="Description of Artificial Sequence: Synthetic polypeptide"
  source: /note="N-term Amino group"
  MOD_RES (1)..(1): CyA
  MOD_RES (7)..(7): Nle
  MOD_RES (18)..(18): Pra
  source: /note="C-term Amide"
AYCQKWLWTCDSKRACCGGLVCKLWCRLII

SEQ ID NO: 1069 - protein, 30 aa, Artificial Sequence
  source: /note="Description of Artificial Sequence: Synthetic polypeptide"
  source: /note="N-term Amino group"
  MOD_RES (1)..(1): CyA
  MOD_RES (7)..(7): Nle
  MOD_RES (18)..(18): Pra
  source: /note="C-term Amide"
AYCQKWLWTCDEERACCGGLRCKLWCRKII

SEQ ID NO: 1070 - protein, 30 aa, Artificial Sequence
  source: /note="Description of Artificial Sequence: Synthetic polypeptide"
  source: /note="N-term Amino group"
  MOD_RES (1)..(1): CyA
  MOD_RES (7)..(7): Nle
  MOD_RES (18)..(18): Pra
  source: /note="C-term Amide"
AYCQKWLWTCDEERACCGDLRCKLWCRKII

SEQ ID NO: 1071 - protein, 30 aa, Artificial Sequence
  source: /note="Description of Artificial Sequence: Synthetic polypeptide"
  source: /note="N-term Amino group"
  MOD_RES (1)..(1): CyA
  MOD_RES (7)..(7): Nle
  MOD_RES (18)..(18): Pra
  source: /note="C-term Amide"
AYCQKWLWTCDEERACCGGLVCKLWCRKII

SEQ ID NO: 1072 - protein, 30 aa, Artificial Sequence
  source: /note="Description of Artificial Sequence: Synthetic polypeptide"
  source: /note="N-term Amino group"
  MOD_RES (1)..(1): CyA
  MOD_RES (7)..(7): Nle
  MOD_RES (18)..(18): Pra
  source: /note="C-term Amide"
AYCQKWLWTCDEERACCGGLRCQLWCRKII

SEQ ID NO: 1073 - protein, 30 aa, Artificial Sequence
  source: /note="Description of Artificial Sequence: Synthetic polypeptide"
  source: /note="N-term Amino group"
  MOD_RES (1)..(1): CyA
  MOD_RES (7)..(7): Nle
  MOD_RES (18)..(18): Pra
  source: /note="C-term Amide"
AYCQKWLWTCDEERACCGGLRCKLWCRYII

SEQ ID NO: 1074 - protein, 30 aa, Artificial Sequence
  source: /note="Description of Artificial Sequence: Synthetic polypeptide"
  source: /note="N-term Amino group"
  MOD_RES (1)..(1): CyA
  MOD_RES (7)..(7): Nle
  MOD_RES (18)..(18): Pra
  source: /note="C-term Amide"
AYCQKWLWTCDEERACCGGLRCKLWCRLII

SEQ ID NO: 1075 - protein, 30 aa, Artificial Sequence
  source: /note="Description of Artificial Sequence: Synthetic polypeptide"
  source: /note="N-term Amino group"
  MOD_RES (1)..(1): CyA
  MOD_RES (7)..(7): Nle
  MOD_RES (18)..(18): Pra
  source: /note="C-term Amide"
AYCQKWLWTCDEERACCGGLVCQLWCRKII

SEQ ID NO: 1076 - protein, 30 aa, Artificial Sequence
  source: /note="Description of Artificial Sequence: Synthetic polypeptide"
  source: /note="N-term Amino group"
  MOD_RES (1)..(1): CyA
  MOD_RES (7)..(7): Nle
  MOD_RES (18)..(18): Pra
  source: /note="C-term Amide"
AYCQKWLWTCDEERACCGGLVCKLWCRYII

SEQ ID NO: 1077 - protein, 30 aa, Artificial Sequence
  source: /note="Description of Artificial Sequence: Synthetic polypeptide"
  source: /note="N-term Amino group"
  MOD_RES (1)..(1): CyA
  MOD_RES (7)..(7): Nle
  MOD_RES (18)..(18): Pra
  source: /note="C-term Amide"
AYCQKWLWTCDEERACCGGLVCKLWCRLII

SEQ ID NO: 1078 - protein, 30 aa, Artificial Sequence
  source: /note="Description of Artificial Sequence: Synthetic polypeptide"
  source: /note="N-term Amino group"
  MOD_RES (1)..(1): CyA
  MOD_RES (7)..(7): Nle
  MOD_RES (18)..(18): Pra
  source: /note="C-term Amide"
AYCQKWLWTCDSERACCGELVCKLWCRKII

SEQ ID NO: 1079 - protein, 30 aa, Artificial Sequence
  source: /note="Description of Artificial Sequence: Synthetic polypeptide"
  source: /note="N-term Amino group"
  MOD_RES (1)..(1): CyA
  MOD_RES (7)..(7): Nle
  MOD_RES (18)..(18): Pra
  source: /note="C-term Amide"
AYCQKWLWTCDSERACCGELRCQLWCRKII

SEQ ID NO: 1080 - protein, 30 aa, Artificial Sequence
  source: /note="Description of Artificial Sequence: Synthetic polypeptide"
  source: /note="N-term Amino group"
  MOD_RES (1)..(1): CyA
  MOD_RES (7)..(7): Nle
  MOD_RES (18)..(18): Pra
  source: /note="C-term Amide"
AYCQKWLWTCDSERACCGELRCKLWCRYII

SEQ ID NO: 1081 - protein, 30 aa, Artificial Sequence
  source: /note="Description of Artificial Sequence: Synthetic polypeptide"
  source: /note="N-term Amino group"
  MOD_RES (1)..(1): CyA
  MOD_RES (7)..(7): Nle
  MOD_RES (18)..(18): Pra
  source: /note="C-term Amide"
AYCQKWLWTCDSERACCGELRCKLWCRLII

SEQ ID NO: 1082 - protein, 30 aa, Artificial Sequence
  source: /note="Description of Artificial Sequence: Synthetic polypeptide"
  source: /note="N-term Amino group"
  MOD_RES (1)..(1): CyA
  MOD_RES (7)..(7): Nle
  MOD_RES (18)..(18): Pra
  source: /note="C-term Amide"
AYCQKWLWTCDSERACCGELVCQLWCRKII

SEQ ID NO: 1083 - protein, 30 aa, Artificial Sequence
  source: /note="Description of Artificial Sequence: Synthetic polypeptide"
  source: /note="N-term Amino group"
  MOD_RES (1)..(1): CyA
  MOD_RES (7)..(7): Nle
  MOD_RES (18)..(18): Pra
  source: /note="C-term Amide"
AYCQKWLWTCDSERACCGELVCKLWCRYII

SEQ ID NO: 1084 - protein, 30 aa, Artificial Sequence
  source: /note="Description of Artificial Sequence: Synthetic polypeptide"
  source: /note="N-term Amino group"
  MOD_RES (1)..(1): CyA
  MOD_RES (7)..(7): Nle
  MOD_RES (18)..(18): Pra
  source: /note="C-term Amide"
AYCQKWLWTCDSERACCGELVCKLWCRLII

SEQ ID NO: 1085 - protein, 30 aa, Artificial Sequence
  source: /note="Description of Artificial Sequence: Synthetic polypeptide"
  source: /note="N-term Amino group"
  MOD_RES (1)..(1): Pra
  MOD_RES (7)..(7): Nle
  source: /note="C-term Amide"
GYCQKWLWTCDEKRACCEGLRCKLWCRKII

SEQ ID NO: 1086 - protein, 30 aa, Artificial Sequence
  source: /note="Description of Artificial Sequence: Synthetic polypeptide"
  source: /note="N-term Amino group"
  MOD_RES (1)..(1): Pra
  MOD_RES (7)..(7): Nle
  source: /note="C-term Amide"
GYCQKWLWTCDSKRECCEGLRCKLWCRKII

SEQ ID NO: 1087 - protein, 30 aa, Artificial Sequence
  source: /note="Description of Artificial Sequence: Synthetic polypeptide"
  source: /note="N-term Amino group"
  MOD_RES (1)..(1): Pra
  MOD_RES (7)..(7): Nle
  source: /note="C-term Amide"
GYCQKWLWTCDSARACCEGLRCKLWCRKII

SEQ ID NO: 1088 - protein, 30 aa, Artificial Sequence
  source: /note="Description of Artificial Sequence: Synthetic polypeptide"
  source: /note="N-term Amino group"
  MOD_RES (1)..(1): Pra
  MOD_RES (7)..(7): Nle
  source: /note="C-term Amide"
GYCQKWLWTCDSKRACCEDLRCKLWCRKII

SEQ ID NO: 1089 - protein, 30 aa, Artificial Sequence
  source: /note="Description of Artificial Sequence: Synthetic polypeptide"
  source: /note="N-term Amino group"
  MOD_RES (1)..(1): Pra
  MOD_RES (7)..(7): Nle
  source: /note="C-term Amide"
GYCQKWLWTCDSKRACCEGLRCQLWCRKII

SEQ ID NO: 1090 - protein, 30 aa, Artificial Sequence
  source: /note="Description of Artificial Sequence: Synthetic polypeptide"
  source: /note="N-term Amino group"
  MOD_RES (1)..(1): Pra
  MOD_RES (7)..(7): Nle
  source: /note="C-term Amide"
GYCQKWLWTCDSKRACCEGLRCKLWCRYII

SEQ ID NO: 1091 - protein, 30 aa, Artificial Sequence
  source: /note="Description of Artificial Sequence: Synthetic polypeptide"
  source: /note="N-term Amino group"
  MOD_RES (1)..(1): Pra
  MOD_RES (7)..(7): Nle
  source: /note="C-term Amide"
GYCQKWLWTCDSKRACCEGLRCKLWCRLII

SEQ ID NO: 1092 - protein, 30 aa, Artificial Sequence
  source: /note="Description of Artificial Sequence: Synthetic polypeptide"
  source: /note="N-term Amino group"
  MOD_RES (1)..(1): Pra
  MOD_RES (7)..(7): Nle
  source: /note="C-term Amide"
GECQKWLWTCDSARACCEGLRCKLWCRKII

SEQ ID NO: 1093 - protein, 30 aa, Artificial Sequence
  source: /note="Description of Artificial Sequence: Synthetic polypeptide"
  source: /note="N-term Amino group"
  MOD_RES (1)..(1): Pra
  MOD_RES (7)..(7): Nle
  source: /note="C-term Amide"
GECQKWLWTCDSKRACCEDLRCKLWCRKII

SEQ ID NO: 1094 - protein, 30 aa, Artificial Sequence
  source: /note="Description of Artificial Sequence: Synthetic polypeptide"
  source: /note="N-term Amino group"
  MOD_RES (1)..(1): Pra
  MOD_RES (7)..(7): Nle
  source: /note="C-term Amide"
GECQKWLWTCDSKRACCEGLVCKLWCRKII

SEQ ID NO: 1095 - protein, 30 aa, Artificial Sequence
  source: /note="Description of Artificial Sequence: Synthetic polypeptide"
  source: /note="N-term Amino group"
  MOD_RES (1)..(1): Pra
  MOD_RES (7)..(7): Nle
  source: /note="C-term Amide"
GECQKWLWTCDSKRACCEGLRCQLWCRKII

SEQ ID NO: 1096 - protein, 30 aa, Artificial Sequence
  source: /note="Description of Artificial Sequence: Synthetic polypeptide"
  source: /note="N-term Amino group"
  MOD_RES (1)..(1): Pra
  MOD_RES (7)..(7): Nle
  source: /note="C-term Amide"
GECQKWLWTCDSKRACCEGLRCKLWCRYII

SEQ ID NO: 1097 - protein, 30 aa, Artificial Sequence
  source: /note="Description of Artificial Sequence: Synthetic polypeptide"
  source: /note="N-term Amino group"
  MOD_RES (1)..(1): Pra
  MOD_RES (7)..(7): Nle
  source: /note="C-term Amide"
GECQKWLWTCDSKRACCEGLRCKLWCRLII

SEQ ID NO: 1098 - protein, 30 aa, Artificial Sequence
  source: /note="Description of Artificial Sequence: Synthetic polypeptide"
  source: /note="N-term Amino group"
  MOD_RES (1)..(1): Pra
  MOD_RES (7)..(7): Nle
  source: /note="C-term Amide"
GYCQKWLWTCDEARACCEGLRCKLWCRKII

SEQ ID NO: 1099 - protein, 30 aa, Artificial Sequence
  source: /note="Description of Artificial Sequence: Synthetic polypeptide"
  source: /note="N-term Amino group"
  MOD_RES (1)..(1): Pra
  MOD_RES (7)..(7): Nle
  source: /note="C-term Amide"
GYCQKWLWTCDEKRACCEDLRCKLWCRKII

SEQ ID NO: 1100 - protein, 30 aa, Artificial Sequence
  source: /note="Description of Artificial Sequence: Synthetic polypeptide"
  source: /note="N-term Amino group"
  MOD_RES (1)..(1): Pra
  MOD_RES (7)..(7): Nle
  source: /note="C-term Amide"
GYCQKWLWTCDEKRACCEGLVCKLWCRKII

SEQ ID NO: 1101 - protein, 30 aa, Artificial Sequence
  source: /note="Description of Artificial Sequence: Synthetic polypeptide"
  source: /note="N-term Amino group"
  MOD_RES (1)..(1): Pra
  MOD_RES (7)..(7): Nle
  source: /note="C-term Amide"
GYCQKWLWTCDEKRACCEGLRCQLWCRKII

SEQ ID NO: 1102 - protein, 30 aa, Artificial Sequence
  source: /note="Description of Artificial Sequence: Synthetic polypeptide"
  source: /note="N-term Amino group"
  MOD_RES (1)..(1): Pra
  MOD_RES (7)..(7): Nle
  source: /note="C-term Amide"
GYCQKWLWTCDEKRACCEGLRCKLWCRYII

SEQ ID NO: 1103 - protein, 30 aa, Artificial Sequence
  source: /note="Description of Artificial Sequence: Synthetic polypeptide"
  source: /note="N-term Amino group"
  MOD_RES (1)..(1): Pra
  MOD_RES (7)..(7): Nle
  source: /note="C-term Amide"
GYCQKWLWTCDEKRACCEGLRCKLWCRLII

SEQ ID NO: 1104 - protein, 30 aa, Artificial Sequence
  source: /note="Description of Artificial Sequence: Synthetic polypeptide"
  source: /note="N-term Amino group"
  MOD_RES (1)..(1): Pra
  MOD_RES (7)..(7): Nle
  source: /note="C-term Amide"
GYCQKWLWTCDSERACCEDLRCKLWCRKII

SEQ ID NO: 1105 - protein, 30 aa, Artificial Sequence
  source: /note="Description of Artificial Sequence: Synthetic polypeptide"
  source: /note="N-term Amino group"
  MOD_RES (1)..(1): Pra
  MOD_RES (7)..(7): Nle
  source: /note="C-term Amide"
GYCQKWLWTCDSERACCEGLVCKLWCRKII

SEQ ID NO: 1106 - protein, 30 aa, Artificial Sequence
  source: /note="Description of Artificial Sequence: Synthetic polypeptide"
  source: /note="N-term Amino group"
  MOD_RES (1)..(1): Pra
  MOD_RES (7)..(7): Nle
  source: /note="C-term Amide"
GYCQKWLWTCDSERACCEGLRCQLWCRKII

SEQ ID NO: 1107 - protein, 30 aa, Artificial Sequence
  source: /note="Description of Artificial Sequence: Synthetic polypeptide"
  source: /note="N-term Amino group"
  MOD_RES (1)..(1): Pra
  MOD_RES (7)..(7): Nle
  source: /note="C-term Amide"
GYCQKWLWTCDSERACCEGLRCKLWCRYII

SEQ ID NO: 1108 - protein, 30 aa, Artificial Sequence
  source: /note="Description of Artificial Sequence: Synthetic polypeptide"
  source: /note="N-term Amino group"
  MOD_RES (1)..(1): Pra
  MOD_RES (7)..(7): Nle
  source: /note="C-term Amide"
GYCQKWLWTCDSERACCEGLRCKLWCRLII

SEQ ID NO: 1109 - protein, 30 aa, Artificial Sequence
  source: /note="Description of Artificial Sequence: Synthetic polypeptide"
  source: /note="N-term Amino group"
  MOD_RES (1)..(1): Pra
  MOD_RES (7)..(7): Nle
  source: /note="C-term Amide"
GYCQKWLWTCDSAEACCEGLRCKLWCRKII

SEQ ID NO: 1110 - protein, 30 aa, Artificial Sequence
  source: /note="Description of Artificial Sequence: Synthetic polypeptide"
  source: /note="N-term Amino group"
  MOD_RES (1)..(1): Pra
  MOD_RES (7)..(7): Nle
  source: /note="C-term Amide"
GYCQKWLWTCDSKEACCEDLRCKLWCRKII

SEQ ID NO: 1111 - protein, 30 aa, Artificial Sequence
  source: /note="Description of Artificial Sequence: Synthetic polypeptide"
  source: /note="N-term Amino group"
  MOD_RES (1)..(1): Pra
  MOD_RES (7)..(7): Nle
  source: /note="C-term Amide"
GYCQKWLWTCDSKEACCEGLVCKLWCRKII

SEQ ID NO: 1112 - protein, 30 aa, Artificial Sequence
  source: /note="Description of Artificial Sequence: Synthetic polypeptide"
  source: /note="N-term Amino group"
  MOD_RES (1)..(1): Pra
  MOD_RES (7)..(7): Nle
  source: /note="C-term Amide"
GYCQKWLWTCDSKEACCEGLRCQLWCRKII

SEQ ID NO: 1113 - protein, 30 aa, Artificial Sequence
  source: /note="Description of Artificial Sequence: Synthetic polypeptide"
  source: /note="N-term Amino group"
  MOD_RES (1)..(1): Pra
  MOD_RES (7)..(7): Nle
  source: /note="C-term Amide"
GYCQKWLWTCDSKEACCEGLRCKLWCRYII

SEQ ID NO: 1114 - protein, 30 aa, Artificial Sequence
  source: /note="Description of Artificial Sequence: Synthetic polypeptide"
  source: /note="N-term Amino group"
  MOD_RES (1)..(1): Pra
  MOD_RES (7)..(7): Nle
  source: /note="C-term Amide"
GYCQKWLWTCDSKEACCEGLRCKLWCRLII

SEQ ID NO: 1115 - protein, 30 aa, Artificial Sequence
  source: /note="Description of Artificial Sequence: Synthetic polypeptide"
  source: /note="N-term Amino group"
  MOD_RES (1)..(1): Pra
  MOD_RES (7)..(7): Nle
  source: /note="C-term Amide"
GYCQKWLWTCDSARACCEGLVCKLWCRKII

SEQ ID NO: 1116 - protein, 30 aa, Artificial Sequence
  source: /note="Description of Artificial Sequence: Synthetic polypeptide"
  source: /note="N-term Amino group"
  MOD_RES (1)..(1): Pra
  MOD_RES (7)..(7): Nle
  source: /note="C-term Amide"
GYCQKWLWTCDSKRACCEDLVCKLWCRKII

SEQ ID NO: 1117 - protein, 30 aa, Artificial Sequence
  source: /note="Description of Artificial Sequence: Synthetic polypeptide"
  source: /note="N-term Amino group"
  MOD_RES (1)..(1): Pra
  MOD_RES (7)..(7): Nle
  source: /note="C-term Amide"
GYCQKWLWTCDSKRACCEGLVCQLWCRKII

SEQ ID NO: 1118 - protein, 30 aa, Artificial Sequence
  source: /note="Description of Artificial Sequence: Synthetic polypeptide"
  source: /note="N-term Amino group"
  MOD_RES (1)..(1): Pra
  MOD_RES (7)..(7): Nle
  source: /note="C-term Amide"
GYCQKWLWTCDSKRACCEGLVCKLWCRYII

SEQ ID NO: 1119 - protein, 30 aa, Artificial Sequence
  source: /note="Description of Artificial Sequence: Synthetic polypeptide"
  source: /note="N-term Amino group"
  MOD_RES (1)..(1): Pra
  MOD_RES (7)..(7): Nle
  source: /note="C-term Amide"
GYCQKWLWTCDSKRACCEGLVCKLWCRLII

SEQ ID NO: 1120 - protein, 30 aa, Artificial Sequence
  source: /note="Description of Artificial Sequence: Synthetic polypeptide"
  source: /note="N-term Amino group"
  MOD_RES (1)..(1): Pra
  MOD_RES (7)..(7): Nle
  source: /note="C-term Amide"
GYCQKWLWTCDEERACCEGLRCKLWCRKII

SEQ ID NO: 1121 - protein, 30 aa, Artificial Sequence
  source: /note="Description of Artificial Sequence: Synthetic polypeptide"
  source: /note="N-term Amino group"
  MOD_RES (1)..(1): Pra
  MOD_RES (7)..(7): Nle
  source: /note="C-term Amide"
GYCQKWLWTCDEERACCEDLRCKLWCRKII

SEQ ID NO: 1122 - protein, 30 aa, Artificial Sequence
  source: /note="Description of Artificial Sequence: Synthetic polypeptide"
  source: /note="N-term Amino group"
  MOD_RES (1)..(1): Pra
  MOD_RES (7)..(7): Nle
  source: /note="C-term Amide"
GYCQKWLWTCDEERACCEGLVCKLWCRKII

SEQ ID NO: 1123 - protein, 30 aa, Artificial Sequence
  source: /note="Description of Artificial Sequence: Synthetic polypeptide"
  source: /note="N-term Amino group"
  MOD_RES (1)..(1): Pra
  MOD_RES (7)..(7): Nle
  source: /note="C-term Amide"
GYCQKWLWTCDEERACCEGLRCQLWCRKII

SEQ ID NO: 1124 - protein, 30 aa, Artificial Sequence
  source: /note="Description of Artificial Sequence: Synthetic polypeptide"
  source: /note="N-term Amino group"
  MOD_RES (1)..(1): Pra
  MOD_RES (7)..(7): Nle
  source: /note="C-term Amide"
GYCQKWLWTCDEERACCEGLRCKLWCRYII

SEQ ID NO: 1125 - protein, 30 aa, Artificial Sequence
  source: /note="Description of Artificial Sequence: Synthetic polypeptide"
  source: /note="N-term Amino group"
  MOD_RES (1)..(1): Pra
  MOD_RES (7)..(7): Nle
  source: /note="C-term Amide"
GYCQKWLWTCDEERACCEGLRCKLWCRLII

SEQ ID NO: 1126 - protein, 30 aa, Artificial Sequence
  source: /note="Description of Artificial Sequence: Synthetic polypeptide"
  source: /note="N-term Amino group"
  MOD_RES (1)..(1): Pra
  MOD_RES (7)..(7): Nle
  source: /note="C-term Amide"
GYCQKWLWTCDEERACCEGLVCQLWCRKII

SEQ ID NO: 1127 - protein, 30 aa, Artificial Sequence
  source: /note="Description of Artificial Sequence: Synthetic polypeptide"
  source: /note="N-term Amino group"
  MOD_RES (1)..(1): Pra
  MOD_RES (7)..(7): Nle
  source: /note="C-term Amide"
GYCQKWLWTCDEERACCEGLVCKLWCRYII

SEQ ID NO: 1128 - protein, 30 aa, Artificial Sequence
  source: /note="Description of Artificial Sequence: Synthetic polypeptide"
  source: /note="N-term Amino group"
  MOD_RES (1)..(1): Pra
  MOD_RES (7)..(7): Nle
  source: /note="C-term Amide"
GYCQKWLWTCDEERACCEGLVCKLWCRLII

SEQ ID NO: 1129 - protein, 30 aa, Artificial Sequence
  source: /note="Description of Artificial Sequence: Synthetic polypeptide"
  source: /note="N-term Amino group"
  MOD_RES (1)..(1): Pra
  MOD_RES (7)..(7): Nle
  source: /note="C-term Amide"
GYCQKWLWTCDSERACCEELVCKLWCRKII

SEQ ID NO: 1130 - protein, 30 aa, Artificial Sequence
  source: /note="Description of Artificial Sequence: Synthetic polypeptide"
  source: /note="N-term Amino group"
  MOD_RES (1)..(1): Pra
  MOD_RES (7)..(7): Nle
  source: /note="C-term Amide"
GYCQKWLWTCDSERACCEELRCQLWCRKII

SEQ ID NO: 1131 - protein, 30 aa, Artificial Sequence
  source: /note="Description of Artificial Sequence: Synthetic polypeptide"
  source: /note="N-term Amino group"
  MOD_RES (1)..(1): Pra
  MOD_RES (7)..(7): Nle
  source: /note="C-term Amide"
GYCQKWLWTCDSERACCEELRCKLWCRYII

SEQ ID NO: 1132 - protein, 30 aa, Artificial Sequence
  source: /note="Description of Artificial Sequence: Synthetic polypeptide"
  source: /note="N-term Amino group"
  MOD_RES (1)..(1): Pra
  MOD_RES (7)..(7): Nle
  source: /note="C-term Amide"
GYCQKWLWTCDSERACCEELRCKLWCRLII

SEQ ID NO: 1133 - protein, 30 aa, Artificial Sequence
  source: /note="Description of Artificial Sequence: Synthetic polypeptide"
  source: /note="N-term Amino group"
  MOD_RES (1)..(1): Pra
  MOD_RES (7)..(7): Nle
  source: /note="C-term Amide"
GYCQKWLWTCDSERACCEELVCQLWCRKII

SEQ ID NO: 1134 - protein, 30 aa, Artificial Sequence
  source: /note="Description of Artificial Sequence: Synthetic polypeptide"
  source: /note="N-term Amino group"
  MOD_RES (1)..(1): Pra
  MOD_RES (7)..(7): Nle
  source: /note="C-term Amide"
GYCQKWLWTCDSERACCEELVCKLWCRYII

SEQ ID NO: 1135 - protein, 30 aa, Artificial Sequence
  source: /note="Description of Artificial Sequence: Synthetic polypeptide"
  source: /note="N-term Amino group"
  MOD_RES (1)..(1): Pra
  MOD_RES (7)..(7): Nle
  source: /note="C-term Amide"
GYCQKWLWTCDSERACCEELVCKLWCRLII

SEQ ID NO: 1136 - protein, 30 aa, Artificial Sequence; identical to SEQ ID NO: 765
  source: /note="Description of Artificial Sequence: Synthetic polypeptide"
  source: /note="N-term Amino group"
  MOD_RES (1)..(1): CyA
  MOD_RES (7)..(7): Nle
  MOD_RES (18)..(18): Pra
  MOD_RES (25)..(25): 5-Br-Trp
  source: /note="C-term Amide"

SEQ ID NO: 1137 - protein, 30 aa, Artificial Sequence; identical to SEQ ID NO: 732
  source: /note="Description of Artificial Sequence: Synthetic polypeptide"
  source: /note="N-term Amino group"
  MOD_RES (1)..(1): CyA
  MOD_RES (7)..(7): Nle
  MOD_RES (18)..(18): Pra
  MOD_RES (25)..(25): 5-Br-Trp
  source: /note="C-term Amide"

SEQ ID NO: 1138 - protein, 30 aa, Artificial Sequence; identical to SEQ ID NO: 733
  source: /note="Description of Artificial Sequence: Synthetic polypeptide"
  source: /note="N-term Amino group"
  MOD_RES (1)..(1): CyA
  MOD_RES (7)..(7): Nle
  MOD_RES (18)..(18): Pra
  MOD_RES (25)..(25): 5-Br-Trp
  source: /note="C-term Amide"

SEQ ID NO: 1139 - protein, 30 aa, Artificial Sequence; identical to SEQ ID NO: 819
  source: /note="Description of Artificial Sequence: Synthetic polypeptide"
  source: /note="N-term Amino group"
  MOD_RES (1)..(1): CyA
  MOD_RES (7)..(7): Nle
  MOD_RES (18)..(18): Pra
  MOD_RES (25)..(25): 5-Br-Trp
  source: /note="C-term Amide"

SEQ ID NO: 1140 - protein, 30 aa, Artificial Sequence; identical to SEQ ID NO: 820
  source: /note="Description of Artificial Sequence: Synthetic polypeptide"
  source: /note="N-term Amino group"
  MOD_RES (1)..(1): CyA
  MOD_RES (7)..(7): Nle
  MOD_RES (18)..(18): Pra
  MOD_RES (25)..(25): 5-Br-Trp
  source: /note="C-term Amide"

SEQ ID NO: 1141 - protein, 30 aa, Artificial Sequence; identical to SEQ ID NO: 821
  source: /note="Description of Artificial Sequence: Synthetic polypeptide"
  source: /note="N-term Amino group"
  MOD_RES (1)..(1): CyA
  MOD_RES (7)..(7): Nle
  MOD_RES (18)..(18): Pra
  MOD_RES (25)..(25): 5-Br-Trp
  source: /note="C-term Amide"

SEQ ID NO: 1142 - protein, 30 aa, Artificial Sequence; identical to SEQ ID NO: 822
  source: /note="Description of Artificial Sequence: Synthetic polypeptide"
  source: /note="N-term Amino group"
  MOD_RES (1)..(1): CyA
  MOD_RES (7)..(7): Nle
  MOD_RES (18)..(18): Pra
  MOD_RES (25)..(25): 5-Br-Trp
  source: /note="C-term Amide"

SEQ ID NO: 1143 - protein, 30 aa, Artificial Sequence; identical to SEQ ID NO: 823
  source: /note="Description of Artificial Sequence: Synthetic polypeptide"
  source: /note="N-term Amino group"
  MOD_RES (1)..(1): CyA
  MOD_RES (7)..(7): Nle
  MOD_RES (18)..(18): Pra
  MOD_RES (25)..(25): 5-Br-Trp
  source: /note="C-term Amide"

SEQ ID NO: 1144 - protein, 30 aa, Artificial Sequence; identical to SEQ ID NO: 824
  source: /note="Description of Artificial Sequence: Synthetic polypeptide"
  source: /note="N-term Amino group"
  MOD_RES (1)..(1): CyA
  MOD_RES (7)..(7): Nle
  MOD_RES (18)..(18): Pra
  MOD_RES (25)..(25): 5-Br-Trp
  source: /note="C-term Amide"

SEQ ID NO: 1145 - protein, 30 aa, Artificial Sequence; identical to SEQ ID NO: 941
  source: /note="Description of Artificial Sequence: Synthetic polypeptide"
  source: /note="N-term Amino group"
  MOD_RES (1)..(1): CyA
  MOD_RES (7)..(7): Nle
  MOD_RES (18)..(18): Pra
  MOD_RES (25)..(25): 5-Br-Trp
  source: /note="C-term Amide"

SEQ ID NO: 1146 - protein, 30 aa, Artificial Sequence; identical to SEQ ID NO: 942
  source: /note="Description of Artificial Sequence: Synthetic polypeptide"
  source: /note="N-term Amino group"
  MOD_RES (1)..(1): CyA
  MOD_RES (7)..(7): Nle
  MOD_RES (18)..(18): Pra
  MOD_RES (25)..(25): 5-Br-Trp
  source: /note="C-term Amide"

SEQ ID NO: 1147 - protein, 30 aa, Artificial Sequence; identical to SEQ ID NO: 943
  source: /note="Description of Artificial Sequence: Synthetic polypeptide"
  source: /note="N-term Amino group"
  MOD_RES (1)..(1): CyA
  MOD_RES (7)..(7): Nle
  MOD_RES (18)..(18): Pra
  MOD_RES (25)..(25): 5-Br-Trp
  source: /note="C-term Amide"

SEQ ID NO: 1148 - protein, 30 aa, Artificial Sequence; identical to SEQ ID NO: 944
  source: /note="Description of Artificial Sequence: Synthetic polypeptide"
  source: /note="N-term Amino group"
  MOD_RES (1)..(1): CyA
  MOD_RES (7)..(7): Nle
  MOD_RES (18)..(18): Pra
  MOD_RES (25)..(25): 5-Br-Trp
  source: /note="C-term Amide"

SEQ ID NO: 1149 - protein, 30 aa, Artificial Sequence; identical to SEQ ID NO: 945
  source: /note="Description of Artificial Sequence: Synthetic polypeptide"
  source: /note="N-term Amino group"
  MOD_RES (1)..(1): CyA
  MOD_RES (7)..(7): Nle
  MOD_RES (18)..(18): Pra
  MOD_RES (25)..(25): 5-Br-Trp
  source: /note="C-term Amide"

SEQ ID NO: 1150 - protein, 30 aa, Artificial Sequence; identical to SEQ ID NO: 946
  source: /note="Description of Artificial Sequence: Synthetic polypeptide"
  source: /note="N-term Amino group"
  MOD_RES (1)..(1): CyA
  MOD_RES (7)..(7): Nle
  MOD_RES (18)..(18): Pra
  MOD_RES (25)..(25): 5-Br-Trp
  source: /note="C-term Amide"

SEQ ID NO: 1151 - protein, 30 aa, Artificial Sequence; identical to SEQ ID NO: 947
  source: /note="Description of Artificial Sequence: Synthetic polypeptide"
  source: /note="N-term Amino group"
  MOD_RES (1)..(1): CyA
  MOD_RES (7)..(7): Nle
  MOD_RES (18)..(18): Pra
  MOD_RES (25)..(25): 5-Br-Trp
  source: /note="C-term Amide"

SEQ ID NO: 1152 - protein, 30 aa, Artificial Sequence; identical to SEQ ID NO: 948
  source: /note="Description of Artificial Sequence: Synthetic polypeptide"
  source: /note="N-term Amino group"
  MOD_RES (1)..(1): CyA
  MOD_RES (7)..(7): Nle
  MOD_RES (18)..(18): Pra
  MOD_RES (25)..(25): 5-Br-Trp
  source: /note="C-term Amide"

SEQ ID NO: 1153 - protein, 30 aa, Artificial Sequence; identical to SEQ ID NO: 949
  source: /note="Description of Artificial Sequence: Synthetic polypeptide"
  source: /note="N-term Amino group"
  MOD_RES (1)..(1): CyA
  MOD_RES (7)..(7): Nle
  MOD_RES (18)..(18): Pra
  MOD_RES (25)..(25): 5-Br-Trp
  source: /note="C-term Amide"

SEQ ID NO: 1154 - protein, 30 aa, Artificial Sequence; identical to SEQ ID NO: 950
  source: /note="Description of Artificial Sequence: Synthetic polypeptide"
  source: /note="N-term Amino group"
  MOD_RES (1)..(1): CyA
  MOD_RES (7)..(7): Nle
  MOD_RES (18)..(18): Pra
  MOD_RES (25)..(25): 5-Br-Trp
  source: /note="C-term Amide"

SEQ ID NO: 1155 - protein, 30 aa, Artificial Sequence; identical to SEQ ID NO: 951
  source: /note="Description of Artificial Sequence: Synthetic polypeptide"
  source: /note="N-term Amino group"
  MOD_RES (1)..(1): CyA
  MOD_RES (7)..(7): Nle
  MOD_RES (18)..(18): Pra
  MOD_RES (25)..(25): 5-Br-Trp
  source: /note="C-term Amide"

SEQ ID NO: 1156 - protein, 30 aa, Artificial Sequence; identical to SEQ ID NO: 952
  source: /note="Description of Artificial Sequence: Synthetic polypeptide"
  source: /note="N-term Amino group"
  MOD_RES (1)..(1): CyA
  MOD_RES (7)..(7): Nle
  MOD_RES (18)..(18): Pra
  MOD_RES (25)..(25): 5-Br-Trp
  source: /note="C-term Amide"

SEQ ID NO: 1157 - protein, 30 aa, Artificial Sequence; identical to SEQ ID NO: 953
  source: /note="Description of Artificial Sequence: Synthetic polypeptide"
  source: /note="N-term Amino group"
  MOD_RES (1)..(1): CyA
  MOD_RES (7)..(7): Nle
  MOD_RES (18)..(18): Pra
  MOD_RES (25)..(25): 5-Br-Trp
  source: /note="C-term Amide"

SEQ ID NO: 1158 - protein, 30 aa, Artificial Sequence; identical to SEQ ID NO: 954
  source: /note="Description of Artificial Sequence: Synthetic polypeptide"
  source: /note="N-term Amino group"
  MOD_RES (1)..(1): CyA
  MOD_RES (7)..(7): Nle
  MOD_RES (18)..(18): Pra
  MOD_RES (25)..(25): 5-Br-Trp
  source: /note="C-term Amide"

SEQ ID NO: 1159 - protein, 30 aa, Artificial Sequence; identical to SEQ ID NO: 955
  source: /note="Description of Artificial Sequence: Synthetic polypeptide"
  source: /note="N-term Amino group"
  MOD_RES (1)..(1): CyA
  MOD_RES (7)..(7): Nle
  MOD_RES (18)..(18): Pra
  MOD_RES (25)..(25): 5-Br-Trp
  source: /note="C-term Amide"

SEQ ID NO: 1160 - protein, 30 aa, Artificial Sequence; identical to SEQ ID NO: 956
  source: /note="Description of Artificial Sequence: Synthetic polypeptide"
  source: /note="N-term Amino group"
  MOD_RES (1)..(1): CyA
  MOD_RES (7)..(7): Nle
  MOD_RES (18)..(18): Pra
  MOD_RES (25)..(25): 5-Br-Trp
  source: /note="C-term Amide"

SEQ ID NO: 1161 - protein, 30 aa, Artificial Sequence; identical to SEQ ID NO: 957
  source: /note="Description of Artificial Sequence: Synthetic polypeptide"
  source: /note="N-term Amino group"
  MOD_RES (1)..(1): CyA
  MOD_RES (7)..(7): Nle
  MOD_RES (18)..(18): Pra
  MOD_RES (25)..(25): 5-Br-Trp
  source: /note="C-term Amide"

SEQ ID NO: 1162 - protein, 30 aa, Artificial Sequence; identical to SEQ ID NO: 958
  source: /note="Description of Artificial Sequence: Synthetic polypeptide"
  source: /note="N-term Amino group"
  MOD_RES (1)..(1): CyA
  MOD_RES (7)..(7): Nle
  MOD_RES (18)..(18): Pra
  MOD_RES (25)..(25): 5-Br-Trp
  source: /note="C-term Amide"

SEQ ID NO: 1163 - protein, 30 aa, Artificial Sequence; identical to SEQ ID NO: 959
  source: /note="Description of Artificial Sequence: Synthetic polypeptide"
  source: /note="N-term Amino group"
  MOD_RES (1)..(1): CyA
  MOD_RES (7)..(7): Nle
  MOD_RES (18)..(18): Pra
  MOD_RES (25)..(25): 5-Br-Trp
  source: /note="C-term Amide"

SEQ ID NO: 1164 - protein, 30 aa, Artificial Sequence; identical to SEQ ID NO: 960
  source: /note="Description of Artificial Sequence: Synthetic polypeptide"
  source: /note="N-term Amino group"
  MOD_RES (1)..(1): CyA
  MOD_RES (7)..(7): Nle
  MOD_RES (18)..(18): Pra
  MOD_RES (25)..(25): 5-Br-Trp
  source: /note="C-term Amide"

SEQ ID NO: 1165 - protein, 30 aa, Artificial Sequence; identical to SEQ ID NO: 961
  source: /note="Description of Artificial Sequence: Synthetic polypeptide"
  source: /note="N-term Amino group"
  MOD_RES (1)..(1): CyA
  MOD_RES (7)..(7): Nle
  MOD_RES (18)..(18): Pra
  MOD_RES (25)..(25): 5-Br-Trp
  source: /note="C-term Amide"

SEQ ID NO: 1166 - protein, 30 aa, Artificial Sequence; identical to SEQ ID NO: 962
  source: /note="Description of Artificial Sequence: Synthetic polypeptide"
  source: /note="N-term Amino group"
  MOD_RES (1)..(1): CyA
  MOD_RES (7)..(7): Nle
  MOD_RES (18)..(18): Pra
  MOD_RES (25)..(25): 5-Br-Trp
  source: /note="C-term Amide"

SEQ ID NO: 1167 - protein, 30 aa, Artificial Sequence; identical to SEQ ID NO: 963
  source: /note="Description of Artificial Sequence: Synthetic polypeptide"
  source: /note="N-term Amino group"
  MOD_RES (1)..(1): CyA
  MOD_RES (7)..(7): Nle
  MOD_RES (18)..(18): Pra
  MOD_RES (25)..(25): 5-Br-Trp
  source: /note="C-term Amide"

SEQ ID NO: 1168 - protein, 30 aa, Artificial Sequence; identical to SEQ ID NO: 964
  source: /note="Description of Artificial Sequence: Synthetic polypeptide"
  source: /note="N-term Amino group"
  MOD_RES (1)..(1): CyA
  MOD_RES (7)..(7): Nle
  MOD_RES (18)..(18): Pra
  MOD_RES (25)..(25): 5-Br-Trp
  source: /note="C-term Amide"

SEQ ID NO: 1169 - protein, 30 aa, Artificial Sequence; identical to SEQ ID NO: 965
  source: /note="Description of Artificial Sequence: Synthetic polypeptide"
  source: /note="N-term Amino group"
  MOD_RES (1)..(1): CyA
  MOD_RES (7)..(7): Nle
  MOD_RES (18)..(18): Pra
  MOD_RES (25)..(25): 5-Br-Trp
  source: /note="C-term Amide"

SEQ ID NO: 1170 - protein, 30 aa, Artificial Sequence; identical to SEQ ID NO: 966
  source: /note="Description of Artificial Sequence: Synthetic polypeptide"
  source: /note="N-term Amino group"
  MOD_RES (1)..(1): CyA
  MOD_RES (7)..(7): Nle
  MOD_RES (18)..(18): Pra
  MOD_RES (25)..(25): 5-Br-Trp
  source: /note="C-term Amide"

SEQ ID NO: 1171 - protein, 30 aa, Artificial Sequence; identical to SEQ ID NO: 967
  source: /note="Description of Artificial Sequence: Synthetic polypeptide"
  source: /note="N-term Amino group"
  MOD_RES (1)..(1): CyA
  MOD_RES (7)..(7): Nle
  MOD_RES (18)..(18): Pra
  MOD_RES (25)..(25): 5-Br-Trp
  source: /note="C-term Amide"

SEQ ID NO: 1172 - protein, 30 aa, Artificial Sequence; identical to SEQ ID NO: 968
  source: /note="Description of Artificial Sequence: Synthetic polypeptide"
  source: /note="N-term Amino group"
  MOD_RES (1)..(1): CyA
  MOD_RES (7)..(7): Nle
  MOD_RES (18)..(18): Pra
  MOD_RES (25)..(25): 5-Br-Trp
  source: /note="C-term Amide"

SEQ ID NO: 1173 - protein, 30 aa, Artificial Sequence; identical to SEQ ID NO: 969
  source: /note="Description of Artificial Sequence: Synthetic polypeptide"
  source: /note="N-term Amino group"
  MOD_RES (1)..(1): CyA
  MOD_RES (7)..(7): Nle
  MOD_RES (18)..(18): Pra
  MOD_RES (25)..(25): 5-Br-Trp
  source: /note="C-term Amide"

SEQ ID NO: 1174 - protein, 30 aa, Artificial Sequence; identical to SEQ ID NO: 970
  source: /note="Description of Artificial Sequence: Synthetic polypeptide"
  source: /note="N-term Amino group"
  MOD_RES (1)..(1): CyA
  MOD_RES (7)..(7): Nle
  MOD_RES (18)..(18): Pra
  MOD_RES (25)..(25): 5-Br-Trp
  source: /note="C-term Amide"

SEQ ID NO: 1175 - protein, 30 aa, Artificial Sequence; identical to SEQ ID NO: 971
  source: /note="Description of Artificial Sequence: Synthetic polypeptide"
  source: /note="N-term Amino group"
  MOD_RES (1)..(1): CyA
  MOD_RES (7)..(7): Nle
  MOD_RES (18)..(18): Pra
  MOD_RES (25)..(25): 5-Br-Trp
  source: /note="C-term Amide"

SEQ ID NO: 1176 - protein, 30 aa, Artificial Sequence; identical to SEQ ID NO: 972
  source: /note="Description of Artificial Sequence: Synthetic polypeptide"
  source: /note="N-term Amino group"
  MOD_RES (1)..(1): CyA
  MOD_RES (7)..(7): Nle
  MOD_RES (18)..(18): Pra
  MOD_RES (25)..(25): 5-Br-Trp
  source: /note="C-term Amide"

SEQ ID NO: 1177 - protein, 30 aa, Artificial Sequence; identical to SEQ ID NO: 973
  source: /note="Description of Artificial Sequence: Synthetic polypeptide"
  source: /note="N-term Amino group"
  MOD_RES (1)..(1): CyA
  MOD_RES (7)..(7): Nle
  MOD_RES (18)..(18): Pra
  MOD_RES (25)..(25): 5-Br-Trp
  source: /note="C-term Amide"

SEQ ID NO: 1178 - protein, 30 aa, Artificial Sequence; identical to SEQ ID NO: 974
  source: /note="Description of Artificial Sequence: Synthetic polypeptide"
  source: /note="N-term Amino group"
  MOD_RES (1)..(1): CyA
  MOD_RES (7)..(7): Nle
  MOD_RES (18)..(18): Pra
  MOD_RES (25)..(25): 5-Br-Trp
  source: /note="C-term Amide"

SEQ ID NO: 1179 - protein, 30 aa, Artificial Sequence; identical to SEQ ID NO: 975
  source: /note="Description of Artificial Sequence: Synthetic polypeptide"
  source: /note="N-term Amino group"
  MOD_RES (1)..(1): CyA
  MOD_RES (7)..(7): Nle
  MOD_RES (18)..(18): Pra
  MOD_RES (25)..(25): 5-Br-Trp
  source: /note="C-term Amide"

SEQ ID NO: 1180 - protein, 30 aa, Artificial Sequence; identical to SEQ ID NO: 976
  source: /note="Description of Artificial Sequence: Synthetic polypeptide"
  source: /note="N-term Amino group"
  MOD_RES (1)..(1): CyA
  MOD_RES (7)..(7): Nle
  MOD_RES (18)..(18): Pra
  MOD_RES (25)..(25): 5-Br-Trp
  source: /note="C-term Amide"

SEQ ID NO: 1181 - protein, 30 aa, Artificial Sequence; identical to SEQ ID NO: 977
  source: /note="Description of Artificial Sequence: Synthetic polypeptide"
  source: /note="N-term Amino group"
  MOD_RES (1)..(1): CyA
  MOD_RES (7)..(7): Nle
  MOD_RES (18)..(18): Pra
  MOD_RES (25)..(25): 5-Br-Trp
  source: /note="C-term Amide"

SEQ ID NO: 1182 - protein, 30 aa, Artificial Sequence; identical to SEQ ID NO: 978
  source: /note="Description of Artificial Sequence: Synthetic polypeptide"
  source: /note="N-term Amino group"
  MOD_RES (1)..(1): CyA
  MOD_RES (7)..(7): Nle
  MOD_RES (18)..(18): Pra
  MOD_RES (25)..(25): 5-Br-Trp
  source: /note="C-term Amide"

SEQ ID NO: 1183 - protein, 30 aa, Artificial Sequence; identical to SEQ ID NO: 979
  source: /note="Description of Artificial Sequence: Synthetic polypeptide"
  source: /note="N-term Amino group"
  MOD_RES (1)..(1): CyA
  MOD_RES (7)..(7): Nle
  MOD_RES (18)..(18): Pra
  MOD_RES (25)..(25): 5-Br-Trp
  source: /note="C-term Amide"

SEQ ID NO: 1184 - protein, 30 aa, Artificial Sequence; identical to SEQ ID NO: 980
  source: /note="Description of Artificial Sequence: Synthetic polypeptide"
  source: /note="N-term Amino group"
  MOD_RES (1)..(1): CyA
  MOD_RES (7)..(7): Nle
  MOD_RES (18)..(18): Pra
  MOD_RES (25)..(25): 5-Br-Trp
  source: /note="C-term Amide"

SEQ ID NO: 1185 - protein, 30 aa, Artificial Sequence; identical to SEQ ID NO: 981
  source: /note="Description of Artificial Sequence: Synthetic polypeptide"
  source: /note="N-term Amino group"
  MOD_RES (1)..(1): CyA
  MOD_RES (7)..(7): Nle
  MOD_RES (18)..(18): Pra
  MOD_RES (25)..(25): 5-Br-Trp
  source: /note="C-term Amide"

SEQ ID NO: 1186 - protein, 30 aa, Artificial Sequence; identical to SEQ ID NO: 982
  source: /note="Description of Artificial Sequence: Synthetic polypeptide"
  source: /note="N-term Amino group"
  MOD_RES (1)..(1): CyA
  MOD_RES (7)..(7): Nle
  MOD_RES (18)..(18): Pra
  MOD_RES (25)..(25): 5-Br-Trp
  source: /note="C-term Amide"

SEQ ID NO: 1187 - protein, 30 aa, Artificial Sequence; identical to SEQ ID NO: 983
  source: /note="Description of Artificial Sequence: Synthetic polypeptide"
  source: /note="N-term Amino group"
  MOD_RES (1)..(1): CyA
  MOD_RES (7)..(7): Nle
  MOD_RES (18)..(18): Pra
  MOD_RES (25)..(25): 5-Br-Trp
  source: /note="C-term Amide"

SEQ ID NO: 1188 - protein, 30 aa, Artificial Sequence; identical to SEQ ID NO: 984
  source: /note="Description of Artificial Sequence: Synthetic polypeptide"
  source: /note="N-term Amino group"
  MOD_RES (1)..(1): CyA
  MOD_RES (7)..(7): Nle
  MOD_RES (18)..(18): Pra
  MOD_RES (25)..(25): 5-Br-Trp
  source: /note="C-term Amide"

SEQ ID NO: 1189 - protein, 30 aa, Artificial Sequence; identical to SEQ ID NO: 985
  source: /note="Description of Artificial Sequence: Synthetic polypeptide"
  source: /note="N-term Amino group"
  MOD_RES (1)..(1): CyA
  MOD_RES (7)..(7): Nle
  MOD_RES (18)..(18): Pra
  MOD_RES (25)..(25): 5-Br-Trp
  source: /note="C-term Amide"

SEQ ID NO: 1190 - protein, 30 aa, Artificial Sequence; identical to SEQ ID NO: 714
  source: /note="Description of Artificial Sequence: Synthetic polypeptide"
  source: /note="N-term Amino group"
  MOD_RES (1)..(1): Pra
  MOD_RES (7)..(7): Nle
  MOD_RES (25)..(25): 5-Br-Trp
  source: /note="C-term Amide"

SEQ ID NO: 1191 - protein, 30 aa, Artificial Sequence; identical to SEQ ID NO: 715
  source: /note="Description of Artificial Sequence: Synthetic polypeptide"
  source: /note="N-term Amino group"
  MOD_RES (1)..(1): Pra
  MOD_RES (7)..(7): Nle
  MOD_RES (25)..(25): 5-Br-Trp
  source: /note="C-term Amide"

SEQ ID NO: 1192 - protein, 30 aa, Artificial Sequence; identical to SEQ ID NO: 717
  source: /note="Description of Artificial Sequence: Synthetic polypeptide"
  source: /note="N-term Amino group"
  MOD_RES (1)..(1): Pra
  MOD_RES (7)..(7): Nle
  MOD_RES (25)..(25): 5-Br-Trp
  source: /note="C-term Amide"

SEQ ID NO: 1193 - protein, 30 aa, Artificial Sequence; identical to SEQ ID NO: 986
  source: /note="Description of Artificial Sequence: Synthetic polypeptide"
  source: /note="N-term Amino group"
  MOD_RES (1)..(1): Pra
  MOD_RES (7)..(7): Nle
  MOD_RES (25)..(25): 5-Br-Trp
  source: /note="C-term Amide"

SEQ ID NO: 1194 - protein, 30 aa, Artificial Sequence; identical to SEQ ID NO: 987
  source: /note="Description of Artificial Sequence: Synthetic polypeptide"
  source: /note="N-term Amino group"
  MOD_RES (1)..(1): Pra
  MOD_RES (7)..(7): Nle
  MOD_RES (25)..(25): 5-Br-Trp
  source: /note="C-term Amide"

SEQ ID NO: 1195 - protein, 30 aa, Artificial Sequence; identical to SEQ ID NO: 645
  source: /note="Description of Artificial Sequence: Synthetic polypeptide"
  source: /note="N-term Amino group"
  MOD_RES (1)..(1): Pra
  MOD_RES (7)..(7): Nle
  MOD_RES (25)..(25): 5-Br-Trp
  source: /note="C-term Amide"

SEQ ID NO: 1196 - protein, 30 aa, Artificial Sequence; identical to SEQ ID NO: 780
  source: /note="Description of Artificial Sequence: Synthetic polypeptide"
  source: /note="N-term Amino group"
  MOD_RES (1)..(1): Pra
  MOD_RES (7)..(7): Nle
  MOD_RES (25)..(25): 5-Br-Trp
  source: /note="C-term Amide"

SEQ ID NO: 1197 - protein, 30 aa, Artificial Sequence; identical to SEQ ID NO: 988
  source: /note="Description of Artificial Sequence: Synthetic polypeptide"
  source: /note="N-term Amino group"
  MOD_RES (1)..(1): Pra
  MOD_RES (7)..(7): Nle
  MOD_RES (25)..(25): 5-Br-Trp
  source: /note="C-term Amide"

SEQ ID NO: 1198 - protein, 30 aa, Artificial Sequence; identical to SEQ ID NO: 989
  source: /note="Description of Artificial Sequence: Synthetic polypeptide"
  source: /note="N-term Amino group"
  MOD_RES (1)..(1): Pra
  MOD_RES (7)..(7): Nle
  MOD_RES (25)..(25): 5-Br-Trp
  source: /note="C-term Amide"

SEQ ID NO: 1199 - protein, 30 aa, Artificial Sequence; identical to SEQ ID NO: 990
  source: /note="Description of Artificial Sequence: Synthetic polypeptide"
  source: /note="N-term Amino group"
  MOD_RES (1)..(1): Pra
  MOD_RES (7)..(7): Nle
  MOD_RES (25)..(25): 5-Br-Trp
  source: /note="C-term Amide"

SEQ ID NO: 1200 - protein, 30 aa, Artificial Sequence; identical to SEQ ID NO: 991
  source: /note="Description of Artificial Sequence: Synthetic polypeptide"
  source: /note="N-term Amino group"
  MOD_RES (1)..(1): Pra
  MOD_RES (7)..(7): Nle
  MOD_RES (25)..(25): 5-Br-Trp
  source: /note="C-term Amide"

SEQ ID NO: 1201 - protein, 30 aa, Artificial Sequence; identical to SEQ ID NO: 992
  source: /note="Description of Artificial Sequence: Synthetic polypeptide"
  source: /note="N-term Amino group"
  MOD_RES (1)..(1): Pra
  MOD_RES (7)..(7): Nle
  MOD_RES (25)..(25): 5-Br-Trp
  source: /note="C-term Amide"

SEQ ID NO: 1202 - protein, 30 aa, Artificial Sequence; identical to SEQ ID NO: 993
  source: /note="Description of Artificial Sequence: Synthetic polypeptide"
  source: /note="N-term Amino group"
  MOD_RES (1)..(1): Pra
  MOD_RES (7)..(7): Nle
  MOD_RES (25)..(25): 5-Br-Trp
  source: /note="C-term Amide"

SEQ ID NO: 1203 - protein, 30 aa, Artificial Sequence; identical to SEQ ID NO: 994
  source: /note="Description of Artificial Sequence: Synthetic polypeptide"
  source: /note="N-term Amino group"
  MOD_RES (1)..(1): Pra
  MOD_RES (7)..(7): Nle
  MOD_RES (25)..(25): 5-Br-Trp
  source: /note="C-term Amide"

SEQ ID NO: 1204 - protein, 30 aa, Artificial Sequence; identical to SEQ ID NO: 995
  source: /note="Description of Artificial Sequence: Synthetic polypeptide"
  source: /note="N-term Amino group"
  MOD_RES (1)..(1): Pra
  MOD_RES (7)..(7): Nle
  MOD_RES (25)..(25): 5-Br-Trp
  source: /note="C-term Amide"

SEQ ID NO: 1205 - protein, 30 aa, Artificial Sequence; identical to SEQ ID NO: 996
  source: /note="Description of Artificial Sequence: Synthetic polypeptide"
  source: /note="N-term Amino group"
  MOD_RES (1)..(1): Pra
  MOD_RES (7)..(7): Nle
  MOD_RES (25)..(25): 5-Br-Trp
  source: /note="C-term Amide"

SEQ ID NO: 1206 - protein, 30 aa, Artificial Sequence; identical to SEQ ID NO: 997
  source: /note="Description of Artificial Sequence: Synthetic polypeptide"
  source: /note="N-term Amino group"
  MOD_RES (1)..(1): Pra
  MOD_RES (7)..(7): Nle
  MOD_RES (25)..(25): 5-Br-Trp
  source: /note="C-term Amide"

SEQ ID NO: 1207 - protein, 30 aa, Artificial Sequence; identical to SEQ ID NO: 998
  source: /note="Description of Artificial Sequence: Synthetic polypeptide"
  source: /note="N-term Amino group"
  MOD_RES (1)..(1): Pra
  MOD_RES (7)..(7): Nle
  MOD_RES (25)..(25): 5-Br-Trp
  source: /note="C-term Amide"

SEQ ID NO: 1208 - protein, 30 aa, Artificial Sequence; identical to SEQ ID NO: 999
  source: /note="Description of Artificial Sequence: Synthetic polypeptide"
  source: /note="N-term Amino group"
  MOD_RES (1)..(1): Pra
  MOD_RES (7)..(7): Nle
  MOD_RES (25)..(25): 5-Br-Trp
  source: /note="C-term Amide"

SEQ ID NO: 1209 - protein, 30 aa, Artificial Sequence; identical to SEQ ID NO: 1000
  source: /note="Description of Artificial Sequence: Synthetic polypeptide"
  source: /note="N-term Amino group"
  MOD_RES (1)..(1): Pra
  MOD_RES (7)..(7): Nle
  MOD_RES (25)..(25): 5-Br-Trp
  source: /note="C-term Amide"

SEQ ID NO: 1210 - protein, 30 aa, Artificial Sequence; identical to SEQ ID NO: 1001
  source: /note="Description of Artificial Sequence: Synthetic polypeptide"
  source: /note="N-term Amino group"
  MOD_RES (1)..(1): Pra
  MOD_RES (7)..(7): Nle
  MOD_RES (25)..(25): 5-Br-Trp
  source: /note="C-term Amide"

SEQ ID NO: 1211 - protein, 30 aa, Artificial Sequence; identical to SEQ ID NO: 1002
  source: /note="Description of Artificial Sequence: Synthetic polypeptide"
  source: /note="N-term Amino group"
  MOD_RES (1)..(1): Pra
  MOD_RES (7)..(7): Nle
  MOD_RES (25)..(25): 5-Br-Trp
  source: /note="C-term Amide"

SEQ ID NO: 1212 - protein, 30 aa, Artificial Sequence; identical to SEQ ID NO: 1003
  source: /note="Description of Artificial Sequence: Synthetic polypeptide"
  source: /note="N-term Amino group"
  MOD_RES (1)..(1): Pra
  MOD_RES (7)..(7): Nle
  MOD_RES (25)..(25): 5-Br-Trp
  source: /note="C-term Amide"

SEQ ID NO: 1213 - protein, 30 aa, Artificial Sequence; identical to SEQ ID NO: 1004
  source: /note="Description of Artificial Sequence: Synthetic polypeptide"
  source: /note="N-term Amino group"
  MOD_RES (1)..(1): Pra
  MOD_RES (7)..(7): Nle
  MOD_RES (25)..(25): 5-Br-Trp
  source: /note="C-term Amide"

SEQ ID NO: 1214 - protein, 30 aa, Artificial Sequence; identical to SEQ ID NO: 1005
  source: /note="Description of Artificial Sequence: Synthetic polypeptide"
  source: /note="N-term Amino group"
  MOD_RES (1)..(1): Pra
  MOD_RES (7)..(7): Nle
  MOD_RES (25)..(25): 5-Br-Trp
  source: /note="C-term Amide"

SEQ ID NO: 1215 - protein, 30 aa, Artificial Sequence; identical to SEQ ID NO: 1006
  source: /note="Description of Artificial Sequence: Synthetic polypeptide"
  source: /note="N-term Amino group"
  MOD_RES (1)..(1): Pra
  MOD_RES (7)..(7): Nle
  MOD_RES (25)..(25): 5-Br-Trp
  source: /note="C-term Amide"

SEQ ID NO: 1216 - protein, 30 aa, Artificial Sequence; identical to SEQ ID NO: 1007
  source: /note="Description of Artificial Sequence: Synthetic polypeptide"
  source: /note="N-term Amino group"
  MOD_RES (1)..(1): Pra
  MOD_RES (7)..(7): Nle
  MOD_RES (25)..(25): 5-Br-Trp
  source: /note="C-term Amide"

SEQ ID NO: 1217 - protein, 30 aa, Artificial Sequence; identical to SEQ ID NO: 1008
  source: /note="Description of Artificial Sequence: Synthetic polypeptide"
  source: /note="N-term Amino group"
  MOD_RES (1)..(1): Pra
  MOD_RES (7)..(7): Nle
  MOD_RES (25)..(25): 5-Br-Trp
  source: /note="C-term Amide"

SEQ ID NO: 1218 - protein, 30 aa, Artificial Sequence; identical to SEQ ID NO: 1009
  source: /note="Description of Artificial Sequence: Synthetic polypeptide"
  source: /note="N-term Amino group"
  MOD_RES (1)..(1): Pra
  MOD_RES (7)..(7): Nle
  MOD_RES (25)..(25): 5-Br-Trp
  source: /note="C-term Amide"

SEQ ID NO: 1219 - protein, 30 aa, Artificial Sequence; identical to SEQ ID NO: 1010
  source: /note="Description of Artificial Sequence: Synthetic polypeptide"
  source: /note="N-term Amino group"
  MOD_RES (1)..(1): Pra
  MOD_RES (7)..(7): Nle
  MOD_RES (25)..(25): 5-Br-Trp
  source: /note="C-term Amide"

SEQ ID NO: 1220 - protein, 30 aa, Artificial Sequence; identical to SEQ ID NO: 1011
  source: /note="Description of Artificial Sequence: Synthetic polypeptide"
  source: /note="N-term Amino group"
  MOD_RES (1)..(1): Pra
  MOD_RES (7)..(7): Nle
  MOD_RES (25)..(25): 5-Br-Trp
  source: /note="C-term Amide"

SEQ ID NO: 1221 - protein, 30 aa, Artificial Sequence; identical to SEQ ID NO: 1012
  source: /note="Description of Artificial Sequence: Synthetic polypeptide"
  source: /note="N-term Amino group"
  MOD_RES (1)..(1): Pra
  MOD_RES (7)..(7): Nle
  MOD_RES (25)..(25): 5-Br-Trp
  source: /note="C-term Amide"

SEQ ID NO: 1222 - protein, 30 aa, Artificial Sequence; identical to SEQ ID NO: 1013
  source: /note="Description of Artificial Sequence: Synthetic polypeptide"
  source: /note="N-term Amino group"
  MOD_RES (1)..(1): Pra
  MOD_RES (7)..(7): Nle
  MOD_RES (25)..(25): 5-Br-Trp
  source: /note="C-term Amide"

SEQ ID NO: 1223 - protein, 30 aa, Artificial Sequence; identical to SEQ ID NO: 1014
  source: /note="Description of Artificial Sequence: Synthetic polypeptide"
  source: /note="N-term Amino group"
  MOD_RES (1)..(1): Pra
  MOD_RES (7)..(7): Nle
  MOD_RES (25)..(25): 5-Br-Trp
  source: /note="C-term Amide"

SEQ ID NO: 1224 - protein, 30 aa, Artificial Sequence; identical to SEQ ID NO: 1015
  source: /note="Description of Artificial Sequence: Synthetic polypeptide"
  source: /note="N-term Amino group"
  MOD_RES (1)..(1): Pra
  MOD_RES (7)..(7): Nle
  MOD_RES (25)..(25): 5-Br-Trp
  source: /note="C-term Amide"

SEQ ID NO: 1225 - protein, 30 aa, Artificial Sequence; identical to SEQ ID NO: 1016
  source: /note="Description of Artificial Sequence: Synthetic polypeptide"
  source: /note="N-term Amino group"
  MOD_RES (1)..(1): Pra
  MOD_RES (7)..(7): Nle
  MOD_RES (25)..(25): 5-Br-Trp
  source: /note="C-term Amide"

SEQ ID NO: 1226 - protein, 30 aa, Artificial Sequence; identical to SEQ ID NO: 1017
  source: /note="Description of Artificial Sequence: Synthetic polypeptide"
  source: /note="N-term Amino group"
  MOD_RES (1)..(1): Pra
  MOD_RES (7)..(7): Nle
  MOD_RES (25)..(25): 5-Br-Trp
  source: /note="C-term Amide"

SEQ ID NO: 1227 - protein, 30 aa, Artificial Sequence; identical to SEQ ID NO: 744
  source: /note="Description of Artificial Sequence: Synthetic polypeptide"
  source: /note="N-term Amino group"
  MOD_RES (1)..(1): Pra
  MOD_RES (7)..(7): Nle
  MOD_RES (25)..(25): 5-Br-Trp
  source: /note="C-term Amide"

SEQ ID NO: 1228 - protein, 30 aa, Artificial Sequence; identical to SEQ ID NO: 1018
  source: /note="Description of Artificial Sequence: Synthetic polypeptide"
  source: /note="N-term Amino group"
  MOD_RES (1)..(1): Pra
  MOD_RES (7)..(7): Nle
  MOD_RES (25)..(25): 5-Br-Trp
  source: /note="C-term Amide"

SEQ ID NO: 1229 - protein, 30 aa, Artificial Sequence; identical to SEQ ID NO: 1019
  source: /note="Description of Artificial Sequence: Synthetic polypeptide"
  source: /note="N-term Amino group"
  MOD_RES (1)..(1): Pra
  MOD_RES (7)..(7): Nle
  MOD_RES (25)..(25): 5-Br-Trp
  source: /note="C-term Amide"

SEQ ID NO: 1230 - protein, 30 aa, Artificial Sequence; identical to SEQ ID NO: 1020
  source: /note="Description of Artificial Sequence: Synthetic polypeptide"
  source: /note="N-term Amino group"
  MOD_RES (1)..(1): Pra
  MOD_RES (7)..(7): Nle
  MOD_RES (25)..(25): 5-Br-Trp
  source: /note="C-term Amide"

SEQ ID NO: 1231 - protein, 30 aa, Artificial Sequence; identical to SEQ ID NO: 1021
  source: /note="Description of Artificial Sequence: Synthetic polypeptide"
  source: /note="N-term Amino group"
  MOD_RES (1)..(1): Pra
  MOD_RES (7)..(7): Nle
  MOD_RES (25)..(25): 5-Br-Trp
  source: /note="C-term Amide"

SEQ ID NO: 1232 - protein, 30 aa, Artificial Sequence; identical to SEQ ID NO: 1022
  source: /note="Description of Artificial Sequence: Synthetic polypeptide"
  source: /note="N-term Amino group"
  MOD_RES (1)..(1): Pra
  MOD_RES (7)..(7): Nle
  MOD_RES (25)..(25): 5-Br-Trp
  source: /note="C-term Amide"

SEQ ID NO: 1233 - protein, 30 aa, Artificial Sequence; identical to SEQ ID NO: 1023
  source: /note="Description of Artificial Sequence: Synthetic polypeptide"
  source: /note="N-term Amino group"
  MOD_RES (1)..(1): Pra
  MOD_RES (7)..(7): Nle
  MOD_RES (25)..(25): 5-Br-Trp
  source: /note="C-term Amide"

SEQ ID NO: 1234 - protein, 30 aa, Artificial Sequence; identical to SEQ ID NO: 1024
  source: /note="Description of Artificial Sequence: Synthetic polypeptide"
  source: /note="N-term Amino group"
  MOD_RES (1)..(1): Pra
  MOD_RES (7)..(7): Nle
  MOD_RES (25)..(25): 5-Br-Trp
  source: /note="C-term Amide"

SEQ ID NO: 1235 - protein, 30 aa, Artificial Sequence; identical to SEQ ID NO: 1025
  source: /note="Description of Artificial Sequence: Synthetic polypeptide"
  source: /note="N-term Amino group"
  MOD_RES (1)..(1): Pra
  MOD_RES (7)..(7): Nle
  MOD_RES (25)..(25): 5-Br-Trp
  source: /note="C-term Amide"

SEQ ID NO: 1236 - protein, 30 aa, Artificial Sequence; identical to SEQ ID NO: 1026
  source: /note="Description of Artificial Sequence: Synthetic polypeptide"
  source: /note="N-term Amino group"
  MOD_RES (1)..(1): Pra
  MOD_RES (7)..(7): Nle
  MOD_RES (25)..(25): 5-Br-Trp
  source: /note="C-term Amide"

SEQ ID NO: 1237 - protein, 30 aa, Artificial Sequence; identical to SEQ ID NO: 1027
  source: /note="Description of Artificial Sequence: Synthetic polypeptide"
  source: /note="N-term Amino group"
  MOD_RES (1)..(1): Pra
  MOD_RES (7)..(7): Nle
  MOD_RES (25)..(25): 5-Br-Trp
  source: /note="C-term Amide"

SEQ ID NO: 1238 - protein, 30 aa, Artificial Sequence; identical to SEQ ID NO: 1028
  source: /note="Description of Artificial Sequence: Synthetic polypeptide"
  source: /note="N-term Amino group"
  MOD_RES (1)..(1): Pra
  MOD_RES (7)..(7): Nle
  MOD_RES (25)..(25): 5-Br-Trp
  source: /note="C-term Amide"

SEQ ID NO: 1239 - protein, 30 aa, Artificial Sequence; identical to SEQ ID NO: 1029
  source: /note="Description of Artificial Sequence: Synthetic polypeptide"
  source: /note="N-term Amino group"
  MOD_RES (1)..(1): Pra
  MOD_RES (7)..(7): Nle
  MOD_RES (25)..(25): 5-Br-Trp
  source: /note="C-term Amide"

SEQ ID NO: 1240 - protein, 30 aa, Artificial Sequence; identical to SEQ ID NO: 1030
  source: /note="Description of Artificial Sequence: Synthetic polypeptide"
  source: /note="N-term Amino group"
  MOD_RES (1)..(1): Pra
  MOD_RES (7)..(7): Nle
  MOD_RES (25)..(25): 5-Br-Trp
  source: /note="C-term Amide"

SEQ ID NO: 1241 - protein, 30 aa, Artificial Sequence; identical to SEQ ID NO: 1031
  source: /note="Description of Artificial Sequence: Synthetic polypeptide"
  source: /note="N-term Amino group"
  MOD_RES (1)..(1): Pra
  MOD_RES (7)..(7): Nle
  MOD_RES (25)..(25): 5-Br-Trp
  source: /note="C-term Amide"

SEQ ID NO: 1242 - protein, 30 aa, Artificial Sequence; identical to SEQ ID NO: 1032
  source: /note="Description of Artificial Sequence: Synthetic polypeptide"
  source: /note="N-term Amino group"
  MOD_RES (1)..(1): Pra
  MOD_RES (7)..(7): Nle
  MOD_RES (25)..(25): 5-Br-Trp
  source: /note="C-term Amide"

SEQ ID NO: 1243 - protein, 30 aa, Artificial Sequence; identical to SEQ ID NO: 1033
  source: /note="Description of Artificial Sequence: Synthetic polypeptide"
  source: /note="N-term Amino group"
  MOD_RES (1)..(1): Pra
  MOD_RES (7)..(7): Nle
  MOD_RES (25)..(25): 5-Br-Trp
  source: /note="C-term Amide"

SEQ ID NO: 1244 - protein, 30 aa, Artificial Sequence; identical to SEQ ID NO: 1034
  source: /note="Description of Artificial Sequence: Synthetic polypeptide"
  source: /note="N-term Amino group"
  MOD_RES (1)..(1): CyA
  MOD_RES (7)..(7): Nle
  MOD_RES (18)..(18): Pra
  MOD_RES (25)..(25): 5-Br-Trp
  source: /note="C-term Amide"

SEQ ID NO: 1245 - protein, 30 aa, Artificial Sequence; identical to SEQ ID NO: 759
  source: /note="Description of Artificial Sequence: Synthetic polypeptide"
  source: /note="N-term Amino group"
  MOD_RES (1)..(1): CyA
  MOD_RES (7)..(7): Nle
  MOD_RES (18)..(18): Pra
  MOD_RES (25)..(25): 5-Br-Trp
  source: /note="C-term Amide"

SEQ ID NO: 1246 - protein, 30 aa, Artificial Sequence; identical to SEQ ID NO: 760
  source: /note="Description of Artificial Sequence: Synthetic polypeptide"
  source: /note="N-term Amino group"
  MOD_RES (1)..(1): CyA
  MOD_RES (7)..(7): Nle
  MOD_RES (18)..(18): Pra
  MOD_RES (25)..(25): 5-Br-Trp
  source: /note="C-term Amide"

SEQ ID NO: 1247 - protein, 30 aa, Artificial Sequence; identical to SEQ ID NO: 1035
  source: /note="Description of Artificial Sequence: Synthetic polypeptide"
  source: /note="N-term Amino group"
  MOD_RES (1)..(1): CyA
  MOD_RES (7)..(7): Nle
  MOD_RES (18)..(18): Pra
  MOD_RES (25)..(25): 5-Br-Trp
  source: /note="C-term Amide"

SEQ ID NO: 1248 - protein, 30 aa, Artificial Sequence; identical to SEQ ID NO: 1036
  source: /note="Description of Artificial Sequence: Synthetic polypeptide"
  source: /note="N-term Amino group"
  MOD_RES (1)..(1): CyA
  MOD_RES (7)..(7): Nle
  MOD_RES (18)..(18): Pra
  MOD_RES (25)..(25): 5-Br-Trp
  source: /note="C-term Amide"

SEQ ID NO: 1249 - protein, 30 aa, Artificial Sequence; identical to SEQ ID NO: 1037
  source: /note="Description of Artificial Sequence: Synthetic polypeptide"
  source: /note="N-term Amino group"
  MOD_RES (1)..(1): CyA
  MOD_RES (7)..(7): Nle
  MOD_RES (18)..(18): Pra
  MOD_RES (25)..(25): 5-Br-Trp
  source: /note="C-term Amide"

SEQ ID NO: 1250 - protein, 30 aa, Artificial Sequence; identical to SEQ ID NO: 1038
  source: /note="Description of Artificial Sequence: Synthetic polypeptide"
  source: /note="N-term Amino group"
  MOD_RES (1)..(1): CyA
  MOD_RES (7)..(7): Nle
  MOD_RES (18)..(18): Pra
  MOD_RES (25)..(25): 5-Br-Trp
  source: /note="C-term Amide"

SEQ ID NO: 1251 - protein, 30 aa, Artificial Sequence; identical to SEQ ID NO: 1039
  source: /note="Description of Artificial Sequence: Synthetic polypeptide"
  source: /note="N-term Amino group"
  MOD_RES (1)..(1): CyA
  MOD_RES (7)..(7): Nle
  MOD_RES (18)..(18): Pra
  MOD_RES (25)..(25): 5-Br-Trp
  source: /note="C-term Amide"

SEQ ID NO: 1252 - protein, 30 aa, Artificial Sequence; identical to SEQ ID NO: 1040
  source: /note="Description of Artificial Sequence: Synthetic polypeptide"
  source: /note="N-term Amino group"
  MOD_RES (1)..(1): CyA
  MOD_RES (7)..(7): Nle
  MOD_RES (18)..(18): Pra
  MOD_RES (25)..(25): 5-Br-Trp
  source: /note="C-term Amide"

SEQ ID NO: 1253 - protein, 30 aa, Artificial Sequence; identical to SEQ ID NO: 1041
  source: /note="Description of Artificial Sequence: Synthetic polypeptide"
  source: /note="N-term Amino group"
  MOD_RES (1)..(1): CyA
  MOD_RES (7)..(7): Nle
  MOD_RES (18)..(18): Pra
  MOD_RES (25)..(25): 5-Br-Trp
  source: /note="C-term Amide"

SEQ ID NO: 1254 - protein, 30 aa, Artificial Sequence; identical to SEQ ID NO: 1042
  source: /note="Description of Artificial Sequence: Synthetic polypeptide"
  source: /note="N-term Amino group"
  MOD_RES (1)..(1): CyA
  MOD_RES (7)..(7): Nle
  MOD_RES (18)..(18): Pra
  MOD_RES (25)..(25): 5-Br-Trp
  source: /note="C-term Amide"

SEQ ID NO: 1255 - protein, 30 aa, Artificial Sequence; identical to SEQ ID NO: 1043
  source: /note="Description of Artificial Sequence: Synthetic polypeptide"
  source: /note="N-term Amino group"
  MOD_RES (1)..(1): CyA
  MOD_RES (7)..(7): Nle
  MOD_RES (18)..(18): Pra
  MOD_RES (25)..(25): 5-Br-Trp
  source: /note="C-term Amide"

SEQ ID NO: 1256 - protein, 30 aa, Artificial Sequence; identical to SEQ ID NO: 1044
  source: /note="Description of Artificial Sequence: Synthetic polypeptide"
  source: /note="N-term Amino group"
  MOD_RES (1)..(1): CyA
  MOD_RES (7)..(7): Nle
  MOD_RES (18)..(18): Pra
  MOD_RES (25)..(25): 5-Br-Trp
  source: /note="C-term Amide"

SEQ ID NO: 1257 - protein, 30 aa, Artificial Sequence; identical to SEQ ID NO: 1045
  source: /note="Description of Artificial Sequence: Synthetic polypeptide"
  source: /note="N-term Amino group"
  MOD_RES (1)..(1): CyA
  MOD_RES (7)..(7): Nle
  MOD_RES (18)..(18): Pra
  MOD_RES (25)..(25): 5-Br-Trp
  source: /note="C-term Amide"

SEQ ID NO: 1258 - protein, 30 aa, Artificial Sequence; identical to SEQ ID NO: 1046
  source: /note="Description of Artificial Sequence: Synthetic polypeptide"
  source: /note="N-term Amino group"
  MOD_RES (1)..(1): CyA
  MOD_RES (7)..(7): Nle
  MOD_RES (18)..(18): Pra
  MOD_RES (25)..(25): 5-Br-Trp
  source: /note="C-term Amide"

SEQ ID NO: 1259 - protein, 30 aa, Artificial Sequence; identical to SEQ ID NO: 1047
  source: /note="Description of Artificial Sequence: Synthetic polypeptide"
  source: /note="N-term Amino group"
  MOD_RES (1)..(1): CyA
  MOD_RES (7)..(7): Nle
  MOD_RES (18)..(18): Pra
  MOD_RES (25)..(25): 5-Br-Trp
  source: /note="C-term Amide"

SEQ ID NO: 1260 - protein, 30 aa, Artificial Sequence; identical to SEQ ID NO: 1048
  source: /note="Description of Artificial Sequence: Synthetic polypeptide"
  source: /note="N-term Amino group"
  MOD_RES (1)..(1): CyA
  MOD_RES (7)..(7): Nle
  MOD_RES (18)..(18): Pra
  MOD_RES (25)..(25): 5-Br-Trp
  source: /note="C-term Amide"

SEQ ID NO: 1261 - protein, 30 aa, Artificial Sequence; identical to SEQ ID NO: 1049
  source: /note="Description of Artificial Sequence: Synthetic polypeptide"
  source: /note="N-term Amino group"
  MOD_RES (1)..(1): CyA
  MOD_RES (7)..(7): Nle
  MOD_RES (18)..(18): Pra
  MOD_RES (25)..(25): 5-Br-Trp
  source: /note="C-term Amide"

SEQ ID NO: 1262 - protein, 30 aa, Artificial Sequence; identical to SEQ ID NO: 1050
  source: /note="Description of Artificial Sequence: Synthetic polypeptide"
  source: /note="N-term Amino group"
  MOD_RES (1)..(1): CyA
  MOD_RES (7)..(7): Nle
  MOD_RES (18)..(18): Pra
  MOD_RES (25)..(25): 5-Br-Trp
  source: /note="C-term Amide"

SEQ ID NO: 1263 - protein, 30 aa, Artificial Sequence; identical to SEQ ID NO: 1051
  source: /note="Description of Artificial Sequence: Synthetic polypeptide"
  source: /note="N-term Amino group"
  MOD_RES (1)..(1): CyA
  MOD_RES (7)..(7): Nle
  MOD_RES (18)..(18): Pra
  MOD_RES (25)..(25): 5-Br-Trp
  source: /note="C-term Amide"

SEQ ID NO: 1264 - protein, 30 aa, Artificial Sequence; identical to SEQ ID NO: 1052
  source: /note="Description of Artificial Sequence: Synthetic polypeptide"
  source: /note="N-term Amino group"
  MOD_RES (1)..(1): CyA
  MOD_RES (7)..(7): Nle
  MOD_RES (18)..(18): Pra
  MOD_RES (25)..(25): 5-Br-Trp
  source: /note="C-term Amide"

SEQ ID NO: 1265 - protein, 30 aa, Artificial Sequence; identical to SEQ ID NO: 1053
  source: /note="Description of Artificial Sequence: Synthetic polypeptide"
  source: /note="N-term Amino group"
  MOD_RES (1)..(1): CyA
  MOD_RES (7)..(7): Nle
  MOD_RES (18)..(18): Pra
  MOD_RES (25)..(25): 5-Br-Trp
  source: /note="C-term Amide"

SEQ ID NO: 1266 - protein, 30 aa, Artificial Sequence; identical to SEQ ID NO: 1054
  source: /note="Description of Artificial Sequence: Synthetic polypeptide"
  source: /note="N-term Amino group"
  MOD_RES (1)..(1): CyA
  MOD_RES (7)..(7): Nle
  MOD_RES (18)..(18): Pra
  MOD_RES (25)..(25): 5-Br-Trp
  source: /note="C-term Amide"

SEQ ID NO: 1267 - protein, 30 aa, Artificial Sequence; identical to SEQ ID NO: 1055
  source: /note="Description of Artificial Sequence: Synthetic polypeptide"
  source: /note="N-term Amino group"
  MOD_RES (1)..(1): CyA
  MOD_RES (7)..(7): Nle
  MOD_RES (18)..(18): Pra
  MOD_RES (25)..(25): 5-Br-Trp
  source: /note="C-term Amide"

SEQ ID NO: 1268 - protein, 30 aa, Artificial Sequence; identical to SEQ ID NO: 1056
  source: /note="Description of Artificial Sequence: Synthetic polypeptide"
  source: /note="N-term Amino group"
  MOD_RES (1)..(1): CyA
  MOD_RES (7)..(7): Nle
  MOD_RES (18)..(18): Pra
  MOD_RES (25)..(25): 5-Br-Trp
  source: /note="C-term Amide"

SEQ ID NO: 1269 - protein, 30 aa, Artificial Sequence; identical to SEQ ID NO: 1057
  source: /note="Description of Artificial Sequence: Synthetic polypeptide"
  source: /note="N-term Amino group"
  MOD_RES (1)..(1): CyA
  MOD_RES (7)..(7): Nle
  MOD_RES (18)..(18): Pra
  MOD_RES (25)..(25): 5-Br-Trp
  source: /note="C-term Amide"

SEQ ID NO: 1270 - protein, 30 aa, Artificial Sequence; identical to SEQ ID NO: 1058
  source: /note="Description of Artificial Sequence: Synthetic polypeptide"
  source: /note="N-term Amino group"
  MOD_RES (1)..(1): CyA
  MOD_RES (7)..(7): Nle
  MOD_RES (18)..(18): Pra
  MOD_RES (25)..(25): 5-Br-Trp
  source: /note="C-term Amide"

SEQ ID NO: 1271 - protein, 30 aa, Artificial Sequence; identical to SEQ ID NO: 1059
  source: /note="Description of Artificial Sequence: Synthetic polypeptide"
  source: /note="N-term Amino group"
  MOD_RES (1)..(1): CyA
  MOD_RES (7)..(7): Nle
  MOD_RES (18)..(18): Pra
  MOD_RES (25)..(25): 5-Br-Trp
  source: /note="C-term Amide"

SEQ ID NO: 1272 - protein, 30 aa, Artificial Sequence; identical to SEQ ID NO: 1060
  source: /note="Description of Artificial Sequence: Synthetic polypeptide"
  source: /note="N-term Amino group"
  MOD_RES (1)..(1): CyA
  MOD_RES (7)..(7): Nle
  MOD_RES (18)..(18): Pra
  MOD_RES (25)..(25): 5-Br-Trp
  source: /note="C-term Amide"

SEQ ID NO: 1273 - protein, 30 aa, Artificial Sequence; identical to SEQ ID NO: 1061
  source: /note="Description of Artificial Sequence: Synthetic polypeptide"
  source: /note="N-term Amino group"
  MOD_RES (1)..(1): CyA
  MOD_RES (7)..(7): Nle
  MOD_RES (18)..(18): Pra
  MOD_RES (25)..(25): 5-Br-Trp
  source: /note="C-term Amide"

SEQ ID NO: 1274 - protein, 30 aa, Artificial Sequence; identical to SEQ ID NO: 1062
  source: /note="Description of Artificial Sequence: Synthetic polypeptide"
  source: /note="N-term Amino group"
  MOD_RES (1)..(1): CyA
  MOD_RES (7)..(7): Nle
  MOD_RES (18)..(18): Pra
  MOD_RES (25)..(25): 5-Br-Trp
  source: /note="C-term Amide"

SEQ ID NO: 1275 - protein, 30 aa, Artificial Sequence; identical to SEQ ID NO: 1063
  source: /note="Description of Artificial Sequence: Synthetic polypeptide"
  source: /note="N-term Amino group"
  MOD_RES (1)..(1): CyA
  MOD_RES (7)..(7): Nle
  MOD_RES (18)..(18): Pra
  MOD_RES (25)..(25): 5-Br-Trp
  source: /note="C-term Amide"

SEQ ID NO: 1276 - protein, 30 aa, Artificial Sequence; identical to SEQ ID NO: 1064
  source: /note="Description of Artificial Sequence: Synthetic polypeptide"
  source: /note="N-term Amino group"
  MOD_RES (1)..(1): CyA
  MOD_RES (7)..(7): Nle
  MOD_RES (18)..(18): Pra
  MOD_RES (25)..(25): 5-Br-Trp
  source: /note="C-term Amide"

SEQ ID NO: 1277 - protein, 30 aa, Artificial Sequence; identical to SEQ ID NO: 1065
  source: /note="Description of Artificial Sequence: Synthetic polypeptide"
  source: /note="N-term Amino group"
  MOD_RES (1)..(1): CyA
  MOD_RES (7)..(7): Nle
  MOD_RES (18)..(18): Pra
  MOD_RES (25)..(25): 5-Br-Trp
  source: /note="C-term Amide"

SEQ ID NO: 1278 - protein, 30 aa, Artificial Sequence; identical to SEQ ID NO: 1066
  source: /note="Description of Artificial Sequence: Synthetic polypeptide"
  source: /note="N-term Amino group"
  MOD_RES (1)..(1): CyA
  MOD_RES (7)..(7): Nle
  MOD_RES (18)..(18): Pra
  MOD_RES (25)..(25): 5-Br-Trp
  source: /note="C-term Amide"

SEQ ID NO: 1279 - protein, 30 aa, Artificial Sequence; identical to SEQ ID NO: 1067
  source: /note="Description of Artificial Sequence: Synthetic polypeptide"
  source: /note="N-term Amino group"
  MOD_RES (1)..(1): CyA
  MOD_RES (7)..(7): Nle
  MOD_RES (18)..(18): Pra
  MOD_RES (25)..(25): 5-Br-Trp
  source: /note="C-term Amide"

SEQ ID NO: 1280 - protein, 30 aa, Artificial Sequence; identical to SEQ ID NO: 1068
  source: /note="Description of Artificial Sequence: Synthetic polypeptide"
  source: /note="N-term Amino group"
  MOD_RES (1)..(1): CyA
  MOD_RES (7)..(7): Nle
  MOD_RES (18)..(18): Pra
  MOD_RES (25)..(25): 5-Br-Trp
  source: /note="C-term Amide"

SEQ ID NO: 1281 - protein, 30 aa, Artificial Sequence; identical to SEQ ID NO: 1069
  source: /note="Description of Artificial Sequence: Synthetic polypeptide"
  source: /note="N-term Amino group"
  MOD_RES (1)..(1): CyA
  MOD_RES (7)..(7): Nle
  MOD_RES (18)..(18): Pra
  MOD_RES (25)..(25): 5-Br-Trp
  source: /note="C-term Amide"

SEQ ID NO: 1282 - protein, 30 aa, Artificial Sequence; identical to SEQ ID NO: 1070
  source: /note="Description of Artificial Sequence: Synthetic polypeptide"
  source: /note="N-term Amino group"
  MOD_RES (1)..(1): CyA
  MOD_RES (7)..(7): Nle
  MOD_RES (18)..(18): Pra
  MOD_RES (25)..(25): 5-Br-Trp
  source: /note="C-term Amide"

SEQ ID NO: 1283 - protein, 30 aa, Artificial Sequence; identical to SEQ ID NO: 1071
  source: /note="Description of Artificial Sequence: Synthetic polypeptide"
  source: /note="N-term Amino group"
  MOD_RES (1)..(1): CyA
  MOD_RES (7)..(7): Nle
  MOD_RES (18)..(18): Pra
  MOD_RES (25)..(25): 5-Br-Trp
  source: /note="C-term Amide"

SEQ ID NO: 1284 - protein, 30 aa, Artificial Sequence; identical to SEQ ID NO: 1072
  source: /note="Description of Artificial Sequence: Synthetic polypeptide"
  source: /note="N-term Amino group"
  MOD_RES (1)..(1): CyA
  MOD_RES (7)..(7): Nle
  MOD_RES (18)..(18): Pra
  MOD_RES (25)..(25): 5-Br-Trp
  source: /note="C-term Amide"

SEQ ID NO: 1285 - protein, 30 aa, Artificial Sequence; identical to SEQ ID NO: 1073
  source: /note="Description of Artificial Sequence: Synthetic polypeptide"
  source: /note="N-term Amino group"
  MOD_RES (1)..(1): CyA
  MOD_RES (7)..(7): Nle
  MOD_RES (18)..(18): Pra
  MOD_RES (25)..(25): 5-Br-Trp
  source: /note="C-term Amide"

SEQ ID NO: 1286 - protein, 30 aa, Artificial Sequence; identical to SEQ ID NO: 1074
  source: /note="Description of Artificial Sequence: Synthetic polypeptide"
  source: /note="N-term Amino group"
  MOD_RES (1)..(1): CyA
  MOD_RES (7)..(7): Nle
  MOD_RES (18)..(18): Pra
  MOD_RES (25)..(25): 5-Br-Trp
  source: /note="C-term Amide"

SEQ ID NO: 1287 - protein, 30 aa, Artificial Sequence; identical to SEQ ID NO: 1075
  source: /note="Description of Artificial Sequence: Synthetic polypeptide"
  source: /note="N-term Amino group"
  MOD_RES (1)..(1): CyA
  MOD_RES (7)..(7): Nle
  MOD_RES (18)..(18): Pra
  MOD_RES (25)..(25): 5-Br-Trp
  source: /note="C-term Amide"

SEQ ID NO: 1288 - protein, 30 aa, Artificial Sequence; identical to SEQ ID NO: 1076
  source: /note="Description of Artificial Sequence: Synthetic polypeptide"
  source: /note="N-term Amino group"
  MOD_RES (1)..(1): CyA
  MOD_RES (7)..(7): Nle
  MOD_RES (18)..(18): Pra
  MOD_RES (25)..(25): 5-Br-Trp
  source: /note="C-term Amide"

SEQ ID NO: 1289 - protein, 30 aa, Artificial Sequence; identical to SEQ ID NO: 1077
  source: /note="Description of Artificial Sequence: Synthetic polypeptide"
  source: /note="N-term Amino group"
  MOD_RES (1)..(1): CyA
  MOD_RES (7)..(7): Nle
  MOD_RES (18)..(18): Pra
  MOD_RES (25)..(25): 5-Br-Trp
  source: /note="C-term Amide"

SEQ ID NO: 1290 - protein, 30 aa, Artificial Sequence; identical to SEQ ID NO: 1078
  source: /note="Description of Artificial Sequence: Synthetic polypeptide"
  source: /note="N-term Amino group"
  MOD_RES (1)..(1): CyA
  MOD_RES (7)..(7): Nle
  MOD_RES (18)..(18): Pra
  MOD_RES (25)..(25): 5-Br-Trp
  source: /note="C-term Amide"

SEQ ID NO: 1291 - protein, 30 aa, Artificial Sequence; identical to SEQ ID NO: 1079
  source: /note="Description of Artificial Sequence: Synthetic polypeptide"
  source: /note="N-term Amino group"
  MOD_RES (1)..(1): CyA
  MOD_RES (7)..(7): Nle
  MOD_RES (18)..(18): Pra
  MOD_RES (25)..(25): 5-Br-Trp
  source: /note="C-term Amide"

SEQ ID NO: 1292 - protein, 30 aa, Artificial Sequence; identical to SEQ ID NO: 1080
  source: /note="Description of Artificial Sequence: Synthetic polypeptide"
  source: /note="N-term Amino group"
  MOD_RES (1)..(1): CyA
  MOD_RES (7)..(7): Nle
  MOD_RES (18)..(18): Pra
  MOD_RES (25)..(25): 5-Br-Trp
  source: /note="C-term Amide"

SEQ ID NO: 1293 - protein, 30 aa, Artificial Sequence; identical to SEQ ID NO: 1081
  source: /note="Description of Artificial Sequence: Synthetic polypeptide"
  source: /note="N-term Amino group"
  MOD_RES (1)..(1): CyA
  MOD_RES (7)..(7): Nle
  MOD_RES (18)..(18): Pra
  MOD_RES (25)..(25): 5-Br-Trp
  source: /note="C-term Amide"

SEQ ID NO: 1294 - protein, 30 aa, Artificial Sequence; identical to SEQ ID NO: 1082
  source: /note="Description of Artificial Sequence: Synthetic polypeptide"
  source: /note="N-term Amino group"
  MOD_RES (1)..(1): CyA
  MOD_RES (7)..(7): Nle
  MOD_RES (18)..(18): Pra
  MOD_RES (25)..(25): 5-Br-Trp
  source: /note="C-term Amide"

SEQ ID NO: 1295 - protein, 30 aa, Artificial Sequence; identical to SEQ ID NO: 1083
  source: /note="Description of Artificial Sequence: Synthetic polypeptide"
  source: /note="N-term Amino group"
  MOD_RES (1)..(1): CyA
  MOD_RES (7)..(7): Nle
  MOD_RES (18)..(18): Pra
  MOD_RES (25)..(25): 5-Br-Trp
  source: /note="C-term Amide"

SEQ ID NO: 1296 - protein, 30 aa, Artificial Sequence; identical to SEQ ID NO: 1084
  source: /note="Description of Artificial Sequence: Synthetic polypeptide"
  source: /note="N-term Amino group"
  MOD_RES (1)..(1): CyA
  MOD_RES (7)..(7): Nle
  MOD_RES (18)..(18): Pra
  MOD_RES (25)..(25): 5-Br-Trp
  source: /note="C-term Amide"

SEQ ID NO: 1297 - protein, 30 aa, Artificial Sequence; identical to SEQ ID NO: 1085
  source: /note="Description of Artificial Sequence: Synthetic polypeptide"
  source: /note="N-term Amino group"
  MOD_RES (1)..(1): Pra
  MOD_RES (7)..(7): Nle
  MOD_RES (25)..(25): 5-Br-Trp
  source: /note="C-term Amide"

SEQ ID NO: 1298 - protein, 30 aa, Artificial Sequence; identical to SEQ ID NO: 730
  source: /note="Description of Artificial Sequence: Synthetic polypeptide"
  source: /note="N-term Amino group"
  MOD_RES (1)..(1): Pra
  MOD_RES (7)..(7): Nle
  MOD_RES (25)..(25): 5-Br-Trp
  source: /note="C-term Amide"

SEQ ID NO: 1299 - protein, 30 aa, Artificial Sequence; identical to SEQ ID NO: 1086
  source: /note="Description of Artificial Sequence: Synthetic polypeptide"
  source: /note="N-term Amino group"
  MOD_RES (1)..(1): Pra
  MOD_RES (7)..(7): Nle
  MOD_RES (25)..(25): 5-Br-Trp
  source: /note="C-term Amide"

SEQ ID NO: 1300 - protein, 30 aa, Artificial Sequence; identical to SEQ ID NO: 1087
  source: /note="Description of Artificial Sequence: Synthetic polypeptide"
  source: /note="N-term Amino group"
  MOD_RES (1)..(1): Pra
  MOD_RES (7)..(7): Nle
  MOD_RES (25)..(25): 5-Br-Trp
  source: /note="C-term Amide"

SEQ ID NO: 1301 - protein, 30 aa, Artificial Sequence; identical to SEQ ID NO: 1088
  source: /note="Description of Artificial Sequence: Synthetic polypeptide"
  source: /note="N-term Amino group"
  MOD_RES (1)..(1): Pra
  MOD_RES (7)..(7): Nle
  MOD_RES (25)..(25): 5-Br-Trp
  source: /note="C-term Amide"

SEQ ID NO: 1302 - protein, 30 aa, Artificial Sequence; identical to SEQ ID NO: 628
  source: /note="Description of Artificial Sequence: Synthetic polypeptide"
  source: /note="N-term Amino group"
  MOD_RES (1)..(1): Pra
  MOD_RES (7)..(7): Nle
  MOD_RES (25)..(25): 5-Br-Trp
  source: /note="C-term Amide"

SEQ ID NO: 1303 - protein, 30 aa, Artificial Sequence; identical to SEQ ID NO: 1089
  source: /note="Description of Artificial Sequence: Synthetic polypeptide"
  source: /note="N-term Amino group"
  MOD_RES (1)..(1): Pra
  MOD_RES (7)..(7): Nle
  MOD_RES (25)..(25): 5-Br-Trp
  source: /note="C-term Amide"

SEQ ID NO: 1304 - protein, 30 aa, Artificial Sequence; identical to SEQ ID NO: 1090
  source: /note="Description of Artificial Sequence: Synthetic polypeptide"
  source: /note="N-term Amino group"
  MOD_RES (1)..(1): Pra
  MOD_RES (7)..(7): Nle
  MOD_RES (25)..(25): 5-Br-Trp
  source: /note="C-term Amide"

SEQ ID NO: 1305 - protein, 30 aa, Artificial Sequence; identical to SEQ ID NO: 1091
  source: /note="Description of Artificial Sequence: Synthetic polypeptide"
  source: /note="N-term Amino group"
  MOD_RES (1)..(1): Pra
  MOD_RES (7)..(7): Nle
  MOD_RES (25)..(25): 5-Br-Trp
  source: /note="C-term Amide"

SEQ ID NO: 1306 - protein, 30 aa, Artificial Sequence; identical to SEQ ID NO: 1092
  source: /note="Description of Artificial Sequence: Synthetic polypeptide"
  source: /note="N-term Amino group"
  MOD_RES (1)..(1): Pra
  MOD_RES (7)..(7): Nle
  MOD_RES (25)..(25): 5-Br-Trp
  source: /note="C-term Amide"

SEQ ID NO: 1307 - protein, 30 aa, Artificial Sequence; identical to SEQ ID NO: 1093
  source: /note="Description of Artificial Sequence: Synthetic polypeptide"
  source: /note="N-term Amino group"
  MOD_RES (1)..(1): Pra
  MOD_RES (7)..(7): Nle
  MOD_RES (25)..(25): 5-Br-Trp
  source: /note="C-term Amide"

SEQ ID NO: 1308 - protein, 30 aa, Artificial Sequence; identical to SEQ ID NO: 1094
  source: /note="Description of Artificial Sequence: Synthetic polypeptide"
  source: /note="N-term Amino group"
  MOD_RES (1)..(1): Pra
  MOD_RES (7)..(7): Nle
  MOD_RES (25)..(25): 5-Br-Trp
  source: /note="C-term Amide"

SEQ ID NO: 1309 - protein, 30 aa, Artificial Sequence; identical to SEQ ID NO: 1095
  source: /note="Description of Artificial Sequence: Synthetic polypeptide"
  source: /note="N-term Amino group"
  MOD_RES (1)..(1): Pra
  MOD_RES (7)..(7): Nle
  MOD_RES (25)..(25): 5-Br-Trp
  source: /note="C-term Amide"

SEQ ID NO: 1310 - protein, 30 aa, Artificial Sequence; identical to SEQ ID NO: 1096
  source: /note="Description of Artificial Sequence: Synthetic polypeptide"
  source: /note="N-term Amino group"
  MOD_RES (1)..(1): Pra
  MOD_RES (7)..(7): Nle
  MOD_RES (25)..(25): 5-Br-Trp
  source: /note="C-term Amide"

SEQ ID NO: 1311 - protein, 30 aa, Artificial Sequence; identical to SEQ ID NO: 1097
  source: /note="Description of Artificial Sequence: Synthetic polypeptide"
  source: /note="N-term Amino group"
  MOD_RES (1)..(1): Pra
  MOD_RES (7)..(7): Nle
  MOD_RES (25)..(25): 5-Br-Trp
  source: /note="C-term Amide"

SEQ ID NO: 1312 - protein, 30 aa, Artificial Sequence; identical to SEQ ID NO: 1098
  source: /note="Description of Artificial Sequence: Synthetic polypeptide"
  source: /note="N-term Amino group"
  MOD_RES (1)..(1): Pra
  MOD_RES (7)..(7): Nle
  MOD_RES (25)..(25): 5-Br-Trp
  source: /note="C-term Amide"

SEQ ID NO: 1313 - protein, 30 aa, Artificial Sequence; identical to SEQ ID NO: 1099
  source: /note="Description of Artificial Sequence: Synthetic polypeptide"
  source: /note="N-term Amino group"
  MOD_RES (1)..(1): Pra
  MOD_RES (7)..(7): Nle
  MOD_RES (25)..(25): 5-Br-Trp
  source: /note="C-term Amide"

SEQ ID NO: 1314 - protein, 30 aa, Artificial Sequence; identical to SEQ ID NO: 1100
  source: /note="Description of Artificial Sequence: Synthetic polypeptide"
  source: /note="N-term Amino group"
  MOD_RES (1)..(1): Pra
  MOD_RES (7)..(7): Nle
  MOD_RES (25)..(25): 5-Br-Trp
  source: /note="C-term Amide"

SEQ ID NO: 1315 - protein, 30 aa, Artificial Sequence; identical to SEQ ID NO: 1101
  source: /note="Description of Artificial Sequence: Synthetic polypeptide"
  source: /note="N-term Amino group"
  MOD_RES (1)..(1): Pra
  MOD_RES (7)..(7): Nle
  MOD_RES (25)..(25): 5-Br-Trp
  source: /note="C-term Amide"

SEQ ID NO: 1316 - protein, 30 aa, Artificial Sequence; identical to SEQ ID NO: 1102
  source: /note="Description of Artificial Sequence: Synthetic polypeptide"
  source: /note="N-term Amino group"
  MOD_RES (1)..(1): Pra
  MOD_RES (7)..(7): Nle
  MOD_RES (25)..(25): 5-Br-Trp
  source: /note="C-term Amide"

SEQ ID NO: 1317 - protein, 30 aa, Artificial Sequence; identical to SEQ ID NO: 1103
  source: /note="Description of Artificial Sequence: Synthetic polypeptide"
  source: /note="N-term Amino group"
  MOD_RES (1)..(1): Pra
  MOD_RES (7)..(7): Nle
  MOD_RES (25)..(25): 5-Br-Trp
  source: /note="C-term Amide"

SEQ ID NO: 1318 - protein, 30 aa, Artificial Sequence; identical to SEQ ID NO: 1104
  source: /note="Description of Artificial Sequence: Synthetic polypeptide"
  source: /note="N-term Amino group"
  MOD_RES (1)..(1): Pra
  MOD_RES (7)..(7): Nle
  MOD_RES (25)..(25): 5-Br-Trp
  source: /note="C-term Amide"

SEQ ID NO: 1319 - protein, 30 aa, Artificial Sequence; identical to SEQ ID NO: 1105
  source: /note="Description of Artificial Sequence: Synthetic polypeptide"
  source: /note="N-term Amino group"
  MOD_RES (1)..(1): Pra
  MOD_RES (7)..(7): Nle
  MOD_RES (25)..(25): 5-Br-Trp
  source: /note="C-term Amide"

SEQ ID NO: 1320 - protein, 30 aa, Artificial Sequence; identical to SEQ ID NO: 1106
  source: /note="Description of Artificial Sequence: Synthetic polypeptide"
  source: /note="N-term Amino group"
  MOD_RES (1)..(1): Pra
  MOD_RES (7)..(7): Nle
  MOD_RES (25)..(25): 5-Br-Trp
  source: /note="C-term Amide"

SEQ ID NO: 1321 - protein, 30 aa, Artificial Sequence; identical to SEQ ID NO: 1107
  source: /note="Description of Artificial Sequence: Synthetic polypeptide"
  source: /note="N-term Amino group"
  MOD_RES (1)..(1): Pra
  MOD_RES (7)..(7): Nle
  MOD_RES (25)..(25): 5-Br-Trp
  source: /note="C-term Amide"

SEQ ID NO: 1322 - protein, 30 aa, Artificial Sequence; identical to SEQ ID NO: 1108
  source: /note="Description of Artificial Sequence: Synthetic polypeptide"
  source: /note="N-term Amino group"
  MOD_RES (1)..(1): Pra
  MOD_RES (7)..(7): Nle
  MOD_RES (25)..(25): 5-Br-Trp
  source: /note="C-term Amide"

SEQ ID NO: 1323 - protein, 30 aa, Artificial Sequence; identical to SEQ ID NO: 1109
  source: /note="Description of Artificial Sequence: Synthetic polypeptide"
  source: /note="N-term Amino group"
  MOD_RES (1)..(1): Pra
  MOD_RES (7)..(7): Nle
  MOD_RES (25)..(25): 5-Br-Trp
  source: /note="C-term Amide"

SEQ ID NO: 1324 - protein, 30 aa, Artificial Sequence; identical to SEQ ID NO: 1110
  source: /note="Description of Artificial Sequence: Synthetic polypeptide"
  source: /note="N-term Amino group"
  MOD_RES (1)..(1): Pra
  MOD_RES (7)..(7): Nle
  MOD_RES (25)..(25): 5-Br-Trp
  source: /note="C-term Amide"

SEQ ID NO: 1325 - protein, 30 aa, Artificial Sequence; identical to SEQ ID NO: 1111
  source: /note="Description of Artificial Sequence: Synthetic polypeptide"
  source: /note="N-term Amino group"
  MOD_RES (1)..(1): Pra
  MOD_RES (7)..(7): Nle
  MOD_RES (25)..(25): 5-Br-Trp
  source: /note="C-term Amide"

SEQ ID NO: 1326 - protein, 30 aa, Artificial Sequence; identical to SEQ ID NO: 1112
  source: /note="Description of Artificial Sequence: Synthetic polypeptide"
  source: /note="N-term Amino group"
  MOD_RES (1)..(1): Pra
  MOD_RES (7)..(7): Nle
  MOD_RES (25)..(25): 5-Br-Trp
  source: /note="C-term Amide"

SEQ ID NO: 1327 - protein, 30 aa, Artificial Sequence; identical to SEQ ID NO: 1113
  source: /note="Description of Artificial Sequence: Synthetic polypeptide"
  source: /note="N-term Amino group"
  MOD_RES (1)..(1): Pra
  MOD_RES (7)..(7): Nle
  MOD_RES (25)..(25): 5-Br-Trp
  source: /note="C-term Amide"

SEQ ID NO: 1328 - protein, 30 aa, Artificial Sequence; identical to SEQ ID NO: 1114
  source: /note="Description of Artificial Sequence: Synthetic polypeptide"
  source: /note="N-term Amino group"
  MOD_RES (1)..(1): Pra
  MOD_RES (7)..(7): Nle
  MOD_RES (25)..(25): 5-Br-Trp
  source: /note="C-term Amide"

SEQ ID NO: 1329 - protein, 30 aa, Artificial Sequence; identical to SEQ ID NO: 1115
  source: /note="Description of Artificial Sequence: Synthetic polypeptide"
  source: /note="N-term Amino group"
  MOD_RES (1)..(1): Pra
  MOD_RES (7)..(7): Nle
  MOD_RES (25)..(25): 5-Br-Trp
  source: /note="C-term Amide"

SEQ ID NO: 1330 - protein, 30 aa, Artificial Sequence; identical to SEQ ID NO: 1116
  source: /note="Description of Artificial Sequence: Synthetic polypeptide"
  source: /note="N-term Amino group"
  MOD_RES (1)..(1): Pra
  MOD_RES (7)..(7): Nle
  MOD_RES (25)..(25): 5-Br-Trp
  source: /note="C-term Amide"

SEQ ID NO: 1331 - protein, 30 aa, Artificial Sequence; identical to SEQ ID NO: 1117
  source: /note="Description of Artificial Sequence: Synthetic polypeptide"
  source: /note="N-term Amino group"
  MOD_RES (1)..(1): Pra
  MOD_RES (7)..(7): Nle
  MOD_RES (25)..(25): 5-Br-Trp
  source: /note="C-term Amide"

SEQ ID NO: 1332 - protein, 30 aa, Artificial Sequence; identical to SEQ ID NO: 1118
  source: /note="Description of Artificial Sequence: Synthetic polypeptide"
  source: /note="N-term Amino group"
  MOD_RES (1)..(1): Pra
  MOD_RES (7)..(7): Nle
  MOD_RES (25)..(25): 5-Br-Trp
  source: /note="C-term Amide"

SEQ ID NO: 1333 - protein, 30 aa, Artificial Sequence; identical to SEQ ID NO: 1119
  source: /note="Description of Artificial Sequence: Synthetic polypeptide"
  source: /note="N-term Amino group"
  MOD_RES (1)..(1): Pra
  MOD_RES (7)..(7): Nle
  MOD_RES (25)..(25): 5-Br-Trp
  source: /note="C-term Amide"

SEQ ID NO: 1334 - protein, 30 aa, Artificial Sequence; identical to SEQ ID NO: 1120
  source: /note="Description of Artificial Sequence: Synthetic polypeptide"
  source: /note="N-term Amino group"
  MOD_RES (1)..(1): Pra
  MOD_RES (7)..(7): Nle
  MOD_RES (25)..(25): 5-Br-Trp
  source: /note="C-term Amide"

SEQ ID NO: 1335 - protein, 30 aa, Artificial Sequence; identical to SEQ ID NO: 1121
  source: /note="Description of Artificial Sequence: Synthetic polypeptide"
  source: /note="N-term Amino group"
  MOD_RES (1)..(1): Pra
  MOD_RES (7)..(7): Nle
  MOD_RES (25)..(25): 5-Br-Trp
  source: /note="C-term Amide"

SEQ ID NO: 1336 - protein, 30 aa, Artificial Sequence; identical to SEQ ID NO: 1122
  source: /note="Description of Artificial Sequence: Synthetic polypeptide"
  source: /note="N-term Amino group"
  MOD_RES (1)..(1): Pra
  MOD_RES (7)..(7): Nle
  MOD_RES (25)..(25): 5-Br-Trp
  source: /note="C-term Amide"

SEQ ID NO: 1337 - protein, 30 aa, Artificial Sequence; identical to SEQ ID NO: 1123
  source: /note="Description of Artificial Sequence: Synthetic polypeptide"
  source: /note="N-term Amino group"
  MOD_RES (1)..(1): Pra
  MOD_RES (7)..(7): Nle
  MOD_RES (25)..(25): 5-Br-Trp
  source: /note="C-term Amide"

SEQ ID NO: 1338 - protein, 30 aa, Artificial Sequence; identical to SEQ ID NO: 1124
  source: /note="Description of Artificial Sequence: Synthetic polypeptide"
  source: /note="N-term Amino group"
  MOD_RES (1)..(1): Pra
  MOD_RES (7)..(7): Nle
  MOD_RES (25)..(25): 5-Br-Trp
  source: /note="C-term Amide"

SEQ ID NO: 1339 - protein, 30 aa, Artificial Sequence; identical to SEQ ID NO: 1125
  source: /note="Description of Artificial Sequence: Synthetic polypeptide"
  source: /note="N-term Amino group"
  MOD_RES (1)..(1): Pra
  MOD_RES (7)..(7): Nle
  MOD_RES (25)..(25): 5-Br-Trp
  source: /note="C-term Amide"

SEQ ID NO: 1340 - protein, 30 aa, Artificial Sequence; identical to SEQ ID NO: 1126
  source: /note="Description of Artificial Sequence: Synthetic polypeptide"
  source: /note="N-term Amino group"
  MOD_RES (1)..(1): Pra
  MOD_RES (7)..(7): Nle
  MOD_RES (25)..(25): 5-Br-Trp
  source: /note="C-term Amide"

SEQ ID NO: 1341 - protein, 30 aa, Artificial Sequence; identical to SEQ ID NO: 1127
  source: /note="Description of Artificial Sequence: Synthetic polypeptide"
  source: /note="N-term Amino group"
  MOD_RES (1)..(1): Pra
  MOD_RES (7)..(7): Nle
  MOD_RES (25)..(25): 5-Br-Trp
  source: /note="C-term Amide"

SEQ ID NO: 1342 - protein, 30 aa, Artificial Sequence; identical to SEQ ID NO: 1128
  source: /note="Description of Artificial Sequence: Synthetic polypeptide"
  source: /note="N-term Amino group"
  MOD_RES (1)..(1): Pra
  MOD_RES (7)..(7): Nle
  MOD_RES (25)..(25): 5-Br-Trp
  source: /note="C-term Amide"

SEQ ID NO: 1343 - protein, 30 aa, Artificial Sequence; identical to SEQ ID NO: 1129
  source: /note="Description of Artificial Sequence: Synthetic polypeptide"
  source: /note="N-term Amino group"
  MOD_RES (1)..(1): Pra
  MOD_RES (7)..(7): Nle
  MOD_RES (25)..(25): 5-Br-Trp
  source: /note="C-term Amide"

SEQ ID NO: 1344 - protein, 30 aa, Artificial Sequence; identical to SEQ ID NO: 1130
  source: /note="Description of Artificial Sequence: Synthetic polypeptide"
  source: /note="N-term Amino group"
  MOD_RES (1)..(1): Pra
  MOD_RES (7)..(7): Nle
  MOD_RES (25)..(25): 5-Br-Trp
  source: /note="C-term Amide"

SEQ ID NO: 1345 - protein, 30 aa, Artificial Sequence; identical to SEQ ID NO: 1131
  source: /note="Description of Artificial Sequence: Synthetic polypeptide"
  source: /note="N-term Amino group"
  MOD_RES (1)..(1): Pra
  MOD_RES (7)..(7): Nle
  MOD_RES (25)..(25): 5-Br-Trp
  source: /note="C-term Amide"

SEQ ID NO: 1346 - protein, 30 aa, Artificial Sequence; identical to SEQ ID NO: 1132
  source: /note="Description of Artificial Sequence: Synthetic polypeptide"
  source: /note="N-term Amino group"
  MOD_RES (1)..(1): Pra
  MOD_RES (7)..(7): Nle
  MOD_RES (25)..(25): 5-Br-Trp
  source: /note="C-term Amide"

SEQ ID NO: 1347 - protein, 30 aa, Artificial Sequence; identical to SEQ ID NO: 1133
  source: /note="Description of Artificial Sequence: Synthetic polypeptide"
  source: /note="N-term Amino group"
  MOD_RES (1)..(1): Pra
  MOD_RES (7)..(7): Nle
  MOD_RES (25)..(25): 5-Br-Trp
  source: /note="C-term Amide"

SEQ ID NO: 1348 - protein, 30 aa, Artificial Sequence; identical to SEQ ID NO: 1134
  source: /note="Description of Artificial Sequence: Synthetic polypeptide"
  source: /note="N-term Amino group"
  MOD_RES (1)..(1): Pra
  MOD_RES (7)..(7): Nle
  MOD_RES (25)..(25): 5-Br-Trp
  source: /note="C-term Amide"

SEQ ID NO: 1349 - protein, 30 aa, Artificial Sequence; identical to SEQ ID NO: 1135
  source: /note="Description of Artificial Sequence: Synthetic polypeptide"
  source: /note="N-term Amino group"
  MOD_RES (1)..(1): Pra
  MOD_RES (7)..(7): Nle
  MOD_RES (25)..(25): 5-Br-Trp
  source: /note="C-term Amide"

SEQ ID NO: 1350 - protein, 30 aa, Artificial Sequence
  source: /note="Description of Artificial Sequence: Synthetic polypeptide"
  source: /note="N-term Amino group"
  MOD_RES (1)..(1): CyA
  MOD_RES (7)..(7): Nle
  MOD_RES (18)..(18): Pra
  MOD_RES (25)..(25): 5-Br-Trp
  source: /note="C-term Amide"
AECQKWLWTCDSKRACCGGLRCKLWCRKEI

SEQ ID NO: 1351 - protein, 30 aa, Artificial Sequence
  source: /note="Description of Artificial Sequence: Synthetic polypeptide"
  source: /note="N-term Amino group"
  MOD_RES (1)..(1): CyA
  MOD_RES (7)..(7): Nle
  MOD_RES (18)..(18): Pra
  MOD_RES (25)..(25): 5-Br-Trp
  source: /note="C-term Amide"
AYCQKWLWTCDSERACCGELRCKLWCRKEI

SEQ ID NO: 1352 - protein, 30 aa, Artificial Sequence; identical to SEQ ID NO: 709
  source: /note="Description of Artificial Sequence: Synthetic polypeptide"
  source: /note="N-term Amino group"
  MOD_RES (1)..(1): Pra
  MOD_RES (7)..(7): Nle
  MOD_RES (25)..(25): 5-Br-Trp
  source: /note="C-term Amide"

SEQ ID NO: 1353 - protein, 30 aa, Artificial Sequence
  source: /note="Description of Artificial Sequence: Synthetic polypeptide"
  source: /note="N-term Amino group"
  MOD_RES (1)..(1): Pra
  MOD_RES (7)..(7): Nle
  MOD_RES (25)..(25): 5-Br-Trp
  source: /note="C-term Amide"
GYCQKWLWTCDSERACCEELRCKLWCRKEI

SEQ ID NO: 1354 - protein, 30 aa, Artificial Sequence
  source: /note="Description of Artificial Sequence: Synthetic polypeptide"
  source: /note="N-term Amino group"
  MOD_RES (1)..(1): CyA
  MOD_RES (7)..(7): Nle
  MOD_RES (18)..(18): Pra
  MOD_RES (25)..(25): 5-Br-Trp
  source: /note="C-term Amide"
AECQKWLWTCDSKRACCGGLRCKLWCRKII

SEQ ID NO: 1355 - protein, 30 aa, Artificial Sequence
  source: /note="Description of Artificial Sequence: Synthetic polypeptide"
  source: /note="N-term Amino group"
  MOD_RES (1)..(1): CyA
  MOD_RES (7)..(7): Nle
  MOD_RES (18)..(18): Pra
  MOD_RES (25)..(25): 5-Br-Trp
  source: /note="C-term Amide"
AYCQKWLWTCDSERACCGELRCKLWCRKII

SEQ ID NO: 1356 - protein, 30 aa, Artificial Sequence
  source: /note="Description of Artificial Sequence: Synthetic polypeptide"
  source: /note="N-term Amino group"
  MOD_RES (1)..(1): Pra
  MOD_RES (7)..(7): Nle
  MOD_RES (25)..(25): 5-Br-Trp
  source: /note="C-term Amide"
GECQKWLWTCDSKRACCEGLRCKLWCRKII

SEQ ID NO: 1357 - protein, 30 aa, Artificial Sequence
  source: /note="Description of Artificial Sequence: Synthetic polypeptide"
  source: /note="N-term Amino group"
  MOD_RES (1)..(1): Pra
  MOD_RES (7)..(7): Nle
  MOD_RES (25)..(25): 5-Br-Trp
  source: /note="C-term Amide"
GYCQKWLWTCDSERACCEELRCKLWCRKII

SEQ ID NO: 1358 - protein, 30 aa, Artificial Sequence
  source: /note="Description of Artificial Sequence: Synthetic polypeptide"
  source: /note="N-term Amino group"
  MOD_RES (1)..(1): CyA
  MOD_RES (6)..(6): hPhe
  MOD_RES (7)..(7): Nle
  MOD_RES (18)..(18): Pra
  MOD_RES (25)..(25): 5-Br-Trp
  source: /note="C-term Amide"
AECQKFLWTCDSKRACCGGLRCKLWCRKEI

SEQ ID NO: 1359 - protein, 30 aa, Artificial Sequence
  source: /note="Description of Artificial Sequence: Synthetic polypeptide"
  source: /note="N-term Amino group"
  MOD_RES (1)..(1): CyA
  MOD_RES (6)..(6): hPhe
  MOD_RES (7)..(7): Nle
  MOD_RES (18)..(18): Pra
  MOD_RES (25)..(25): 5-Br-Trp
  source: /note="C-term Amide"
AYCQKFLWTCDEKRACCGGLRCKLWCRKEI

SEQ ID NO: 1360 - protein, 30 aa, Artificial Sequence
  source: /note="Description of Artificial Sequence: Synthetic polypeptide"
  source: /note="N-term Amino group"
  MOD_RES (1)..(1): CyA
  MOD_RES (6)..(6): hPhe
  MOD_RES (7)..(7): Nle
  MOD_RES (18)..(18): Pra
  MOD_RES (25)..(25): 5-Br-Trp
  source: /note="C-term Amide"
AYCQKFLWTCDSERACCGGLRCKLWCRKEI

SEQ ID NO: 1361 - protein, 30 aa, Artificial Sequence
  source: /note="Description of Artificial Sequence: Synthetic polypeptide"
  source: /note="N-term Amino group"
  MOD_RES (1)..(1): CyA
  MOD_RES (6)..(6): hPhe
  MOD_RES (7)..(7): Nle
  MOD_RES (18)..(18): Pra
  MOD_RES (25)..(25): 5-Br-Trp
  source: /note="C-term Amide"
AYCQKFLWTCDSKRECCGGLRCKLWCRKEI

SEQ ID NO: 1362 - protein, 30 aa, Artificial Sequence
  source: /note="Description of Artificial Sequence: Synthetic polypeptide"
  source: /note="N-term Amino group"
  MOD_RES (1)..(1): CyA
  MOD_RES (6)..(6): hPhe
  MOD_RES (7)..(7): Nle
  MOD_RES (18)..(18): Pra
  MOD_RES (25)..(25): 5-Br-Trp
  source: /note="C-term Amide"
AYCQKFLWTCDEERACCGGLRCKLWCRKEI

SEQ ID NO: 1363 - protein, 30 aa, Artificial Sequence
  source: /note="Description of Artificial Sequence: Synthetic polypeptide"
  source: /note="N-term Amino group"
  MOD_RES (1)..(1): CyA
  MOD_RES (6)..(6): hPhe
  MOD_RES (7)..(7): Nle
  MOD_RES (18)..(18): Pra
  MOD_RES (25)..(25): 5-Br-Trp
  source: /note="C-term Amide"
AYCQKFLWTCDSERACCGELRCKLWCRKEI

SEQ ID NO: 1364 - protein, 30 aa, Artificial Sequence
  source: /note="Description of Artificial Sequence: Synthetic polypeptide"
  source: /note="N-term Amino group"
  MOD_RES (1)..(1): Pra
  MOD_RES (6)..(6): hPhe
  MOD_RES (7)..(7): Nle
  MOD_RES (25)..(25): 5-Br-Trp
  source: /note="C-term Amide"
GECQKFLWTCDSKRACCEGLRCKLWCRKEI

SEQ ID NO: 1365 - protein, 30 aa, Artificial Sequence
  source: /note="Description of Artificial Sequence: Synthetic polypeptide"
  source: /note="N-term Amino group"
  MOD_RES (1)..(1): Pra
  MOD_RES (6)..(6): hPhe
  MOD_RES (7)..(7): Nle
  MOD_RES (25)..(25): 5-Br-Trp
  source: /note="C-term Amide"
GYCQKFLWTCDEKRACCEGLRCKLWCRKEI

SEQ ID NO: 1366 - protein, 30 aa, Artificial Sequence
  source: /note="Description of Artificial Sequence: Synthetic polypeptide"
  source: /note="N-term Amino group"
  MOD_RES (1)..(1): Pra
  MOD_RES (6)..(6): hPhe
  MOD_RES (7)..(7): Nle
  MOD_RES (25)..(25): 5-Br-Trp
  source: /note="C-term Amide"
GYCQKFLWTCDSERACCEGLRCKLWCRKEI

SEQ ID NO: 1367 - protein, 30 aa, Artificial Sequence
  source: /note="Description of Artificial Sequence: Synthetic polypeptide"
  source: /note="N-term Amino group"
  MOD_RES (1)..(1): Pra
  MOD_RES (6)..(6): hPhe
  MOD_RES (7)..(7): Nle
  MOD_RES (25)..(25): 5-Br-Trp
  source: /note="C-term Amide"
GYCQKFLWTCDSKRECCEGLRCKLWCRKEI

SEQ ID NO: 1368 - protein, 30 aa, Artificial Sequence
  source: /note="Description of Artificial Sequence: Synthetic polypeptide"
  source: /note="N-term Amino group"
  MOD_RES (1)..(1): Pra
  MOD_RES (6)..(6): hPhe
  MOD_RES (7)..(7): Nle
  MOD_RES (25)..(25): 5-Br-Trp
  source: /note="C-term Amide"
GYCQKFLWTCDEERACCEGLRCKLWCRKEI

SEQ ID NO: 1369 - protein, 30 aa, Artificial Sequence
  source: /note="Description of Artificial Sequence: Synthetic polypeptide"
  source: /note="N-term Amino group"
  MOD_RES (1)..(1): Pra
  MOD_RES (6)..(6): hPhe
  MOD_RES (7)..(7): Nle
  MOD_RES (25)..(25): 5-Br-Trp
  source: /note="C-term Amide"
GYCQKFLWTCDSERACCEELRCKLWCRKEI

SEQ ID NO: 1370 - protein, 30 aa, Artificial Sequence
  source: /note="Description of Artificial Sequence: Synthetic polypeptide"
  source: /note="N-term Amino group"
  MOD_RES (1)..(1): CyA
  MOD_RES (6)..(6): hPhe
  MOD_RES (7)..(7): Nle
  MOD_RES (18)..(18): Pra
  MOD_RES (25)..(25): 5-Br-Trp
  source: /note="C-term Amide"
AECQKFLWTCDSKRACCGGLRCKLWCRKII

SEQ ID NO: 1371 - protein, 30 aa, Artificial Sequence
  source: /note="Description of Artificial Sequence: Synthetic polypeptide"
  source: /note="N-term Amino group"
  MOD_RES (1)..(1): CyA
  MOD_RES (6)..(6): hPhe
  MOD_RES (7)..(7): Nle
  MOD_RES (18)..(18): Pra
  MOD_RES (25)..(25): 5-Br-Trp
  source: /note="C-term Amide"
AYCQKFLWTCDEKRACCGGLRCKLWCRKII

SEQ ID NO: 1372 - protein, 30 aa, Artificial Sequence
  source: /note="Description of Artificial Sequence: Synthetic polypeptide"
  source: /note="N-term Amino group"
  MOD_RES (1)..(1): CyA
  MOD_RES (6)..(6): hPhe
  MOD_RES (7)..(7): Nle
  MOD_RES (18)..(18): Pra
  MOD_RES (25)..(25): 5-Br-Trp
  source: /note="C-term Amide"
AYCQKFLWTCDSERACCGGLRCKLWCRKII

SEQ ID NO: 1373 - protein, 30 aa, Artificial Sequence
  source: /note="Description of Artificial Sequence: Synthetic polypeptide"
  source: /note="N-term Amino group"
  MOD_RES (1)..(1): CyA
  MOD_RES (6)..(6): hPhe
  MOD_RES (7)..(7): Nle
  MOD_RES (18)..(18): Pra
  MOD_RES (25)..(25): 5-Br-Trp
  source: /note="C-term Amide"
AYCQKFLWTCDSKRECCGGLRCKLWCRKII

SEQ ID NO: 1374 - protein, 30 aa, Artificial Sequence
  source: /note="Description of Artificial Sequence: Synthetic polypeptide"
  source: /note="N-term Amino group"
  MOD_RES (1)..(1): CyA
  MOD_RES (6)..(6): hPhe
  MOD_RES (7)..(7): Nle
  MOD_RES (18)..(18): Pra
  MOD_RES (25)..(25): 5-Br-Trp
  source: /note="C-term Amide"
AYCQKFLWTCDEERACCGGLRCKLWCRKII

SEQ ID NO: 1375 - protein, 30 aa, Artificial Sequence
  source: /note="Description of Artificial Sequence: Synthetic polypeptide"
  source: /note="N-term Amino group"
  MOD_RES (1)..(1): CyA
  MOD_RES (6)..(6): hPhe
  MOD_RES (7)..(7): Nle
  MOD_RES (18)..(18): Pra
  MOD_RES (25)..(25): 5-Br-Trp
  source: /note="C-term Amide"
AYCQKFLWTCDSERACCGELRCKLWCRKII

SEQ ID NO: 1376 - protein, 30 aa, Artificial Sequence
  source: /note="Description of Artificial Sequence: Synthetic polypeptide"
  source: /note="N-term Amino group"
  MOD_RES (1)..(1): Pra
  MOD_RES (6)..(6): hPhe
  MOD_RES (7)..(7): Nle
  MOD_RES (25)..(25): 5-Br-Trp
  source: /note="C-term Amide"
GECQKFLWTCDSKRACCEGLRCKLWCRKII

SEQ ID NO: 1377 - protein, 30 aa, Artificial Sequence
  source: /note="Description of Artificial Sequence: Synthetic polypeptide"
  source: /note="N-term Amino group"
  MOD_RES (1)..(1): Pra
  MOD_RES (6)..(6): hPhe
  MOD_RES (7)..(7): Nle
  MOD_RES (25)..(25): 5-Br-Trp
  source: /note="C-term Amide"
GYCQKFLWTCDEKRACCEGLRCKLWCRKII

SEQ ID NO: 1378 - protein, 30 aa, Artificial Sequence
  source: /note="Description of Artificial Sequence: Synthetic polypeptide"
  source: /note="N-term Amino group"
  MOD_RES (1)..(1): Pra
  MOD_RES (6)..(6): hPhe
  MOD_RES (7)..(7): Nle
  MOD_RES (25)..(25): 5-Br-Trp
  source: /note="C-term Amide"
GYCQKFLWTCDSERACCEGLRCKLWCRKII

SEQ ID NO: 1379 - protein, 30 aa, Artificial Sequence
  source: /note="Description of Artificial Sequence: Synthetic polypeptide"
  source: /note="N-term Amino group"
  MOD_RES (1)..(1): Pra
  MOD_RES (6)..(6): hPhe
  MOD_RES (7)..(7): Nle
  MOD_RES (25)..(25): 5-Br-Trp
  source: /note="C-term Amide"
GYCQKFLWTCDSKRECCEGLRCKLWCRKII

SEQ ID NO: 1380 - protein, 30 aa, Artificial Sequence
  source: /note="Description of Artificial Sequence: Synthetic polypeptide"
  source: /note="N-term Amino group"
  MOD_RES (1)..(1): Pra
  MOD_RES (6)..(6): hPhe
  MOD_RES (7)..(7): Nle
  MOD_RES (25)..(25): 5-Br-Trp
  source: /note="C-term Amide"
GYCQKFLWTCDEERACCEGLRCKLWCRKII

SEQ ID NO: 1381 - protein, 30 aa, Artificial Sequence
  source: /note="Description of Artificial Sequence: Synthetic polypeptide"
  source: /note="N-term Amino group"
  MOD_RES (1)..(1): Pra
  MOD_RES (6)..(6): hPhe
  MOD_RES (7)..(7): Nle
  MOD_RES (25)..(25): 5-Br-Trp
  source: /note="C-term Amide"
GYCQKFLWTCDSERACCEELRCKLWCRKII

SEQ ID NO: 1382 - protein, 30 aa, Artificial Sequence
  source: /note="Description of Artificial Sequence: Synthetic polypeptide"
  source: /note="N-term Amino group"
  MOD_RES (1)..(1): CyA
  MOD_RES (7)..(7): Nle
  MOD_RES (18)..(18): Pra
  MOD_RES (24)..(24): Chg
  MOD_RES (25)..(25): 5-Br-Trp
  source: /note="C-term Amide"
AECQKWLWTCDSKRACCGGLRCKGWCRKEI

SEQ ID NO: 1383 - protein, 30 aa, Artificial Sequence
  source: /note="Description of Artificial Sequence: Synthetic polypeptide"
  source: /note="N-term Amino group"
  MOD_RES (1)..(1): CyA
  MOD_RES (7)..(7): Nle
  MOD_RES (18)..(18): Pra
  MOD_RES (24)..(24): Chg
  MOD_RES (25)..(25): 5-Br-Trp
  source: /note="C-term Amide"
AYCQKWLWTCDEKRACCGGLRCKGWCRKEI

SEQ ID NO: 1384 - protein, 30 aa, Artificial Sequence
  source: /note="Description of Artificial Sequence: Synthetic polypeptide"
  source: /note="N-term Amino group"
  MOD_RES (1)..(1): CyA
  MOD_RES (7)..(7): Nle
  MOD_RES (18)..(18): Pra
  MOD_RES (24)..(24): Chg
  MOD_RES (25)..(25): 5-Br-Trp
  source: /note="C-term Amide"
AYCQKWLWTCDSERACCGGLRCKGWCRKEI

SEQ ID NO: 1385 - protein, 30 aa, Artificial Sequence
  source: /note="Description of Artificial Sequence: Synthetic polypeptide"
  source: /note="N-term Amino group"
  MOD_RES (1)..(1): CyA
  MOD_RES (7)..(7): Nle
  MOD_RES (18)..(18): Pra
  MOD_RES (24)..(24): Chg
  MOD_RES (25)..(25): 5-Br-Trp
  source: /note="C-term Amide"
AYCQKWLWTCDSKRECCGGLRCKGWCRKEI

SEQ ID NO: 1386 - protein, 30 aa, Artificial Sequence
  source: /note="Description of Artificial Sequence: Synthetic polypeptide"
  source: /note="N-term Amino group"
  MOD_RES (1)..(1): CyA
  MOD_RES (7)..(7): Nle
  MOD_RES (18)..(18): Pra
  MOD_RES (24)..(24): Chg
  MOD_RES (25)..(25): 5-Br-Trp
  source: /note="C-term Amide"
AYCQKWLWTCDEERACCGGLRCKGWCRKEI

SEQ ID NO: 1387 - protein, 30 aa, Artificial Sequence
  source: /note="Description of Artificial Sequence: Synthetic polypeptide"
  source: /note="N-term Amino group"
  MOD_RES (1)..(1): CyA
  MOD_RES (7)..(7): Nle
  MOD_RES (18)..(18): Pra
  MOD_RES (24)..(24): Chg
  MOD_RES (25)..(25): 5-Br-Trp
  source: /note="C-term Amide"
AYCQKWLWTCDSERACCGELRCKGWCRKEI

SEQ ID NO: 1388 - protein, 30 aa, Artificial Sequence
  source: /note="Description of Artificial Sequence: Synthetic polypeptide"
  source: /note="N-term Amino group"
  MOD_RES (1)..(1): Pra
  MOD_RES (7)..(7): Nle
  MOD_RES (24)..(24): Chg
  MOD_RES (25)..(25): 5-Br-Trp
  source: /note="C-term Amide"
GECQKWLWTCDSKRACCEGLRCKGWCRKEI

SEQ ID NO: 1389 - protein, 30 aa, Artificial Sequence
  source: /note="Description of Artificial Sequence: Synthetic polypeptide"
  source: /note="N-term Amino group"
  MOD_RES (1)..(1): Pra
  MOD_RES (7)..(7): Nle
  MOD_RES (24)..(24): Chg
  MOD_RES (25)..(25): 5-Br-Trp
  source: /note="C-term Amide"
GYCQKWLWTCDEKRACCEGLRCKGWCRKEI

SEQ ID NO: 1390 - protein, 30 aa, Artificial Sequence
  source: /note="Description of Artificial Sequence: Synthetic polypeptide"
  source: /note="N-term Amino group"
  MOD_RES (1)..(1): Pra
  MOD_RES (7)..(7): Nle
  MOD_RES (24)..(24): Chg
  MOD_RES (25)..(25): 5-Br-Trp
  source: /note="C-term Amide"
GYCQKWLWTCDSERACCEGLRCKGWCRKEI

SEQ ID NO: 1391 - protein, 30 aa, Artificial Sequence
  source: /note="Description of Artificial Sequence: Synthetic polypeptide"
  source: /note="N-term Amino group"
  MOD_RES (1)..(1): Pra
  MOD_RES (7)..(7): Nle
  MOD_RES (24)..(24): Chg
  MOD_RES (25)..(25): 5-Br-Trp
  source: /note="C-term Amide"
GYCQKWLWTCDSKRECCEGLRCKGWCRKEI

SEQ ID NO: 1392 - protein, 30 aa, Artificial Sequence
  source: /note="Description of Artificial Sequence: Synthetic polypeptide"
  source: /note="N-term Amino group"
  MOD_RES (1)..(1): Pra
  MOD_RES (7)..(7): Nle
  MOD_RES (24)..(24): Chg
  MOD_RES (25)..(25): 5-Br-Trp
  source: /note="C-term Amide"
GYCQKWLWTCDEERACCEGLRCKGWCRKEI

SEQ ID NO: 1393 - protein, 30 aa, Artificial Sequence
  source: /note="Description of Artificial Sequence: Synthetic polypeptide"
  source: /note="N-term Amino group"
  MOD_RES (1)..(1): Pra
  MOD_RES (7)..(7): Nle
  MOD_RES (24)..(24): Chg
  MOD_RES (25)..(25): 5-Br-Trp
  source: /note="C-term Amide"
GYCQKWLWTCDSERACCEELRCKGWCRKEI

SEQ ID NO: 1394 - protein, 30 aa, Artificial Sequence
  source: /note="Description of Artificial Sequence: Synthetic polypeptide"
  source: /note="N-term Amino group"
  MOD_RES (1)..(1): CyA
  MOD_RES (7)..(7): Nle
  MOD_RES (18)..(18): Pra
  MOD_RES (24)..(24): Chg
  MOD_RES (25)..(25): 5-Br-Trp
  source: /note="C-term Amide"
AECQKWLWTCDSKRACCGGLRCKGWCRKII

SEQ ID NO: 1395 - protein, 30 aa, Artificial Sequence
  source: /note="Description of Artificial Sequence: Synthetic polypeptide"
  source: /note="N-term Amino group"
  MOD_RES (1)..(1): CyA
  MOD_RES (7)..(7): Nle
  MOD_RES (18)..(18): Pra
  MOD_RES (24)..(24): Chg
  MOD_RES (25)..(25): 5-Br-Trp
  source: /note="C-term Amide"
AYCQKWLWTCDEKRACCGGLRCKGWCRKII

SEQ ID NO: 1396 - protein, 30 aa, Artificial Sequence
  source: /note="Description of Artificial Sequence: Synthetic polypeptide"
  source: /note="N-term Amino group"
  MOD_RES (1)..(1): CyA
  MOD_RES (7)..(7): Nle
  MOD_RES (18)..(18): Pra
  MOD_RES (24)..(24): Chg
  MOD_RES (25)..(25): 5-Br-Trp
  source: /note="C-term Amide"
AYCQKWLWTCDSERACCGGLRCKGWCRKII

SEQ ID NO: 1397 - protein, 30 aa, Artificial Sequence
  source: /note="Description of Artificial Sequence: Synthetic polypeptide"
  source: /note="N-term Amino group"
  MOD_RES (1)..(1): CyA
  MOD_RES (7)..(7): Nle
  MOD_RES (18)..(18): Pra
  MOD_RES (24)..(24): Chg
  MOD_RES (25)..(25): 5-Br-Trp
  source: /note="C-term Amide"
AYCQKWLWTCDSKRECCGGLRCKGWCRKII

SEQ ID NO: 1398 - protein, 30 aa, Artificial Sequence
  source: /note="Description of Artificial Sequence: Synthetic polypeptide"
  source: /note="N-term Amino group"
  MOD_RES (1)..(1): CyA
  MOD_RES (7)..(7): Nle
  MOD_RES (18)..(18): Pra
  MOD_RES (24)..(24): Chg
  MOD_RES (25)..(25): 5-Br-Trp
  source: /note="C-term Amide"
AYCQKWLWTCDEERACCGGLRCKGWCRKII

SEQ ID NO: 1399 - protein, 30 aa, Artificial Sequence
  source: /note="Description of Artificial Sequence: Synthetic polypeptide"
  source: /note="N-term Amino group"
  MOD_RES (1)..(1): CyA
  MOD_RES (7)..(7): Nle
  MOD_RES (18)..(18): Pra
  MOD_RES (24)..(24): Chg
  MOD_RES (25)..(25): 5-Br-Trp
  source: /note="C-term Amide"
AYCQKWLWTCDSERACCGELRCKGWCRKII

SEQ ID NO: 1400 - protein, 30 aa, Artificial Sequence
  source: /note="Description of Artificial Sequence: Synthetic polypeptide"
  source: /note="N-term Amino group"
  MOD_RES (1)..(1): Pra
  MOD_RES (7)..(7): Nle
  MOD_RES (24)..(24): Chg
  MOD_RES (25)..(25): 5-Br-Trp
  source: /note="C-term Amide"
GECQKWLWTCDSKRACCEGLRCKGWCRKII

SEQ ID NO: 1401 - protein, 30 aa, Artificial Sequence
  source: /note="Description of Artificial Sequence: Synthetic polypeptide"
  source: /note="N-term Amino group"
  MOD_RES (1)..(1): Pra
  MOD_RES (7)..(7): Nle
  MOD_RES (24)..(24): Chg
  MOD_RES (25)..(25): 5-Br-Trp
  source: /note="C-term Amide"
GYCQKWLWTCDEKRACCEGLRCKGWCRKII

SEQ ID NO: 1402 - protein, 30 aa, Artificial Sequence
  source: /note="Description of Artificial Sequence: Synthetic polypeptide"
  source: /note="N-term Amino group"
  MOD_RES (1)..(1): Pra
  MOD_RES (7)..(7): Nle
  MOD_RES (24)..(24): Chg
  MOD_RES (25)..(25): 5-Br-Trp
  source: /note="C-term Amide"
GYCQKWLWTCDSERACCEGLRCKGWCRKII

SEQ ID NO: 1403 - protein, 30 aa, Artificial Sequence
  source: /note="Description of Artificial Sequence: Synthetic polypeptide"
  source: /note="N-term Amino group"
  MOD_RES (1)..(1): Pra
  MOD_RES (7)..(7): Nle
  MOD_RES (24)..(24): Chg
  MOD_RES (25)..(25): 5-Br-Trp
  source: /note="C-term Amide"
GYCQKWLWTCDSKRECCEGLRCKGWCRKII

SEQ ID NO: 1404 - protein, 30 aa, Artificial Sequence
  source: /note="Description of Artificial Sequence: Synthetic polypeptide"
  source: /note="N-term Amino group"
  MOD_RES (1)..(1): Pra
  MOD_RES (7)..(7): Nle
  MOD_RES (24)..(24): Chg
  MOD_RES (25)..(25): 5-Br-Trp
  source: /note="C-term Amide"
GYCQKWLWTCDEERACCEGLRCKGWCRKII

SEQ ID NO: 1405 - protein, 30 aa, Artificial Sequence
  source: /note="Description of Artificial Sequence: Synthetic polypeptide"
  source: /note="N-term Amino group"
  MOD_RES (1)..(1): Pra
  MOD_RES (7)..(7): Nle
  MOD_RES (24)..(24): Chg
  MOD_RES (25)..(25): 5-Br-Trp
  source: /note="C-term Amide"
GYCQKWLWTCDSERACCEELRCKGWCRKII

SEQ ID NO: 1406 - protein, 30 aa, Artificial Sequence
  source: /note="Description of Artificial Sequence: Synthetic polypeptide"
  source: /note="N-term Amino group"
  MOD_RES (1)..(1): CyA
  MOD_RES (7)..(7): Nle
  MOD_RES (18)..(18): Pra
  MOD_RES (25)..(25): 5-Br-Trp
  source: /note="C-term Amide"
AECQKWLWTCDSKRACCGGLRCKLWCRKEF

SEQ ID NO: 1407 - protein, 30 aa, Artificial Sequence
  source: /note="Description of Artificial Sequence: Synthetic polypeptide"
  source: /note="N-term Amino group"
  MOD_RES (1)..(1): CyA
  MOD_RES (7)..(7): Nle
  MOD_RES (18)..(18): Pra
  MOD_RES (25)..(25): 5-Br-Trp
  source: /note="C-term Amide"
AYCQKWLWTCDEKRACCGGLRCKLWCRKEF

SEQ ID NO: 1408 - protein, 30 aa, Artificial Sequence
  source: /note="Description of Artificial Sequence: Synthetic polypeptide"
  source: /note="N-term Amino group"
  MOD_RES (1)..(1): CyA
  MOD_RES (7)..(7): Nle
  MOD_RES (18)..(18): Pra
  MOD_RES (25)..(25): 5-Br-Trp
  source: /note="C-term Amide"
AYCQKWLWTCDSERACCGGLRCKLWCRKEF

SEQ ID NO: 1409 - protein, 30 aa, Artificial Sequence
  source: /note="Description of Artificial Sequence: Synthetic polypeptide"
  source: /note="N-term Amino group"
  MOD_RES (1)..(1): CyA
  MOD_RES (7)..(7): Nle
  MOD_RES (18)..(18): Pra
  MOD_RES (25)..(25): 5-Br-Trp
  source: /note="C-term Amide"
AYCQKWLWTCDSKRECCGGLRCKLWCRKEF

SEQ ID NO: 1410 - protein, 30 aa, Artificial Sequence
  source: /note="Description of Artificial Sequence: Synthetic polypeptide"
  source: /note="N-term Amino group"
  MOD_RES (1)..(1): CyA
  MOD_RES (7)..(7): Nle
  MOD_RES (18)..(18): Pra
  MOD_RES (25)..(25): 5-Br-Trp
  source: /note="C-term Amide"
AYCQKWLWTCDEERACCGGLRCKLWCRKEF

SEQ ID NO: 1411 - protein, 30 aa, Artificial Sequence
  source: /note="Description of Artificial Sequence: Synthetic polypeptide"
  source: /note="N-term Amino group"
  MOD_RES (1)..(1): CyA
  MOD_RES (7)..(7): Nle
  MOD_RES (18)..(18): Pra
  MOD_RES (25)..(25): 5-Br-Trp
  source: /note="C-term Amide"
AYCQKWLWTCDSERACCGELRCKLWCRKEF

SEQ ID NO: 1412 - protein, 30 aa, Artificial Sequence
  source: /note="Description of Artificial Sequence: Synthetic polypeptide"
  source: /note="N-term Amino group"
  MOD_RES (1)..(1): Pra
  MOD_RES (7)..(7): Nle
  MOD_RES (25)..(25): 5-Br-Trp
  source: /note="C-term Amide"
GECQKWLWTCDSKRACCEGLRCKLWCRKEF

SEQ ID NO: 1413 - protein, 30 aa, Artificial Sequence
  source: /note="Description of Artificial Sequence: Synthetic polypeptide"
  source: /note="N-term Amino group"
  MOD_RES (1)..(1): Pra
  MOD_RES (7)..(7): Nle
  MOD_RES (25)..(25): 5-Br-Trp
  source: /note="C-term Amide"
GYCQKWLWTCDEKRACCEGLRCKLWCRKEF

SEQ ID NO: 1414 - protein, 30 aa, Artificial Sequence
  source: /note="Description of Artificial Sequence: Synthetic polypeptide"
  source: /note="N-term Amino group"
  MOD_RES (1)..(1): Pra
  MOD_RES (7)..(7): Nle
  MOD_RES (25)..(25): 5-Br-Trp
  source: /note="C-term Amide"
GYCQKWLWTCDSERACCEGLRCKLWCRKEF

SEQ ID NO: 1415 - protein, 30 aa, Artificial Sequence
  source: /note="Description of Artificial Sequence: Synthetic polypeptide"
  source: /note="N-term Amino group"
  MOD_RES (1)..(1): Pra
  MOD_RES (7)..(7): Nle
  MOD_RES (25)..(25): 5-Br-Trp
  source: /note="C-term Amide"
GYCQKWLWTCDSKRECCEGLRCKLWCRKEF

SEQ ID NO: 1416 - protein, 30 aa, Artificial Sequence
  source: /note="Description of Artificial Sequence: Synthetic polypeptide"
  source: /note="N-term Amino group"
  MOD_RES (1)..(1): Pra
  MOD_RES (7)..(7): Nle
  MOD_RES (25)..(25): 5-Br-Trp
  source: /note="C-term Amide"
GYCQKWLWTCDEERACCEGLRCKLWCRKEF

SEQ ID NO: 1417 - protein, 30 aa, Artificial Sequence
  source: /note="Description of Artificial Sequence: Synthetic polypeptide"
  source: /note="N-term Amino group"
  MOD_RES (1)..(1): Pra
  MOD_RES (7)..(7): Nle
  MOD_RES (25)..(25): 5-Br-Trp
  source: /note="C-term Amide"
GYCQKWLWTCDSERACCEELRCKLWCRKEF

SEQ ID NO: 1418 - protein, 30 aa, Artificial Sequence
  source: /note="Description of Artificial Sequence: Synthetic polypeptide"
  source: /note="N-term Amino group"
  MOD_RES (1)..(1): CyA
  MOD_RES (7)..(7): Nle
  MOD_RES (18)..(18): Pra
  MOD_RES (25)..(25): 5-Br-Trp
  source: /note="C-term Amide"
AECQKWLWTCDSKRACCGGLRCKLWCRKIF

SEQ ID NO: 1419 - protein, 30 aa, Artificial Sequence
  source: /note="Description of Artificial Sequence: Synthetic polypeptide"
  source: /note="N-term Amino group"
  MOD_RES (1)..(1): CyA
  MOD_RES (7)..(7): Nle
  MOD_RES (18)..(18): Pra
  MOD_RES (25)..(25): 5-Br-Trp
  source: /note="C-term Amide"
AYCQKWLWTCDEKRACCGGLRCKLWCRKIF

SEQ ID NO: 1420 - protein, 30 aa, Artificial Sequence
  source: /note="Description of Artificial Sequence: Synthetic polypeptide"
  source: /note="N-term Amino group"
  MOD_RES (1)..(1): CyA
  MOD_RES (7)..(7): Nle
  MOD_RES (18)..(18): Pra
  MOD_RES (25)..(25): 5-Br-Trp
  source: /note="C-term Amide"
AYCQKWLWTCDSERACCGGLRCKLWCRKIF

SEQ ID NO: 1421 - protein, 30 aa, Artificial Sequence
  source: /note="Description of Artificial Sequence: Synthetic polypeptide"
  source: /note="N-term Amino group"
  MOD_RES (1)..(1): CyA
  MOD_RES (7)..(7): Nle
  MOD_RES (18)..(18): Pra
  MOD_RES (25)..(25): 5-Br-Trp
  source: /note="C-term Amide"
AYCQKWLWTCDSKRECCGGLRCKLWCRKIF

SEQ ID NO: 1422 - protein, 30 aa, Artificial Sequence
  source: /note="Description of Artificial Sequence: Synthetic polypeptide"
  source: /note="N-term Amino group"
  MOD_RES (1)..(1): CyA
  MOD_RES (7)..(7): Nle
  MOD_RES (18)..(18): Pra
  MOD_RES (25)..(25): 5-Br-Trp
  source: /note="C-term Amide"
AYCQKWLWTCDEERACCGGLRCKLWCRKIF

SEQ ID NO: 1423 - protein, 30 aa, Artificial Sequence
  source: /note="Description of Artificial Sequence: Synthetic polypeptide"
  source: /note="N-term Amino group"
  MOD_RES (1)..(1): CyA
  MOD_RES (7)..(7): Nle
  MOD_RES (18)..(18): Pra
  MOD_RES (25)..(25): 5-Br-Trp
  source: /note="C-term Amide"
AYCQKWLWTCDSERACCGELRCKLWCRKIF

SEQ ID NO: 1424 - protein, 30 aa, Artificial Sequence
  source: /note="Description of Artificial Sequence: Synthetic polypeptide"
  source: /note="N-term Amino group"
  MOD_RES (1)..(1): Pra
  MOD_RES (7)..(7): Nle
  MOD_RES (25)..(25): 5-Br-Trp
  source: /note="C-term Amide"
GECQKWLWTCDSKRACCEGLRCKLWCRKIF

SEQ ID NO: 1425 - protein, 30 aa, Artificial Sequence
  source: /note="Description of Artificial Sequence: Synthetic polypeptide"
  source: /note="N-term Amino group"
  MOD_RES (1)..(1): Pra
  MOD_RES (7)..(7): Nle
  MOD_RES (25)..(25): 5-Br-Trp
  source: /note="C-term Amide"
GYCQKWLWTCDEKRACCEGLRCKLWCRKIF

SEQ ID NO: 1426 - protein, 30 aa, Artificial Sequence
  source: /note="Description of Artificial Sequence: Synthetic polypeptide"
  source: /note="N-term Amino group"
  MOD_RES (1)..(1): Pra
  MOD_RES (7)..(7): Nle
  MOD_RES (25)..(25): 5-Br-Trp
  source: /note="C-term Amide"
GYCQKWLWTCDSERACCEGLRCKLWCRKIF

SEQ ID NO: 1427 - protein, 30 aa, Artificial Sequence
  source: /note="Description of Artificial Sequence: Synthetic polypeptide"
  source: /note="N-term Amino group"
  MOD_RES (1)..(1): Pra
  MOD_RES (7)..(7): Nle
  MOD_RES (25)..(25): 5-Br-Trp
  source: /note="C-term Amide"
GYCQKWLWTCDSKRECCEGLRCKLWCRKIF

SEQ ID NO: 1428 - protein, 30 aa, Artificial Sequence
  source: /note="Description of Artificial Sequence: Synthetic polypeptide"
  source: /note="N-term Amino group"
  MOD_RES (1)..(1): Pra
  MOD_RES (7)..(7): Nle
  MOD_RES (25)..(25): 5-Br-Trp
  source: /note="C-term Amide"
GYCQKWLWTCDEERACCEGLRCKLWCRKIF

SEQ ID NO: 1429 - protein, 30 aa, Artificial Sequence
  source: /note="Description of Artificial Sequence: Synthetic polypeptide"
  source: /note="N-term Amino group"
  MOD_RES (1)..(1): Pra
  MOD_RES (7)..(7): Nle
  MOD_RES (25)..(25): 5-Br-Trp
  source: /note="C-term Amide"
GYCQKWLWTCDSERACCEELRCKLWCRKIF

SEQ ID NO: 1430 - protein, 30 aa, Artificial Sequence
  source: /note="Description of Artificial Sequence: Synthetic polypeptide"
  source: /note="N-term Amino group"
  MOD_RES (1)..(1): Pra
  MOD_RES (7)..(7): Nle
  MOD_RES (25)..(25): 5-Br-Trp
  source: /note="C-term Amide"
GYCQKWLWTCDSKRECCEGLVCKLWCRKEI

SEQ ID NO: 1431 - protein, 30 aa, Artificial Sequence
  source: /note="Description of Artificial Sequence: Synthetic polypeptide"
  source: /note="N-term Amino group"
  MOD_RES (1)..(1): Pra
  MOD_RES (7)..(7): Nle
  MOD_RES (25)..(25): 5-Br-Trp
  source: /note="C-term Amide"
GYCQKWLWTCDSKRECCEGLVCKLWCRKII

SEQ ID NO: 1432 - protein, 30 aa, Artificial Sequence
  source: /note="Description of Artificial Sequence: Synthetic polypeptide"
  source: /note="N-term Amino group"
  MOD_RES (1)..(1): CyA
  MOD_RES (6)..(6): hPhe
  MOD_RES (7)..(7): Nle
  MOD_RES (18)..(18): Pra
  MOD_RES (25)..(25): 5-Br-Trp
  source: /note="C-term Amide"
AECQKFLWTCDSKRACCGGLVCKLWCRKEI

SEQ ID NO: 1433 - protein, 30 aa, Artificial Sequence
  source: /note="Description of Artificial Sequence: Synthetic polypeptide"
  source: /note="N-term Amino group"
  MOD_RES (1)..(1): CyA
  MOD_RES (6)..(6): hPhe
  MOD_RES (7)..(7): Nle
  MOD_RES (18)..(18): Pra
  MOD_RES (25)..(25): 5-Br-Trp
  source: /note="C-term Amide"
AYCQKFLWTCDEKRACCGGLVCKLWCRKEI

SEQ ID NO: 1434 - protein, 30 aa, Artificial Sequence
  source: /note="Description of Artificial Sequence: Synthetic polypeptide"
  source: /note="N-term Amino group"
  MOD_RES (1)..(1): CyA
  MOD_RES (6)..(6): hPhe
  MOD_RES (7)..(7): Nle
  MOD_RES (18)..(18): Pra
  MOD_RES (25)..(25): 5-Br-Trp
  source: /note="C-term Amide"
AYCQKFLWTCDSERACCGGLVCKLWCRKEI

SEQ ID NO: 1435 - protein, 30 aa, Artificial Sequence
  source: /note="Description of Artificial Sequence: Synthetic polypeptide"
  source: /note="N-term Amino group"
  MOD_RES (1)..(1): CyA
  MOD_RES (6)..(6): hPhe
  MOD_RES (7)..(7): Nle
  MOD_RES (18)..(18): Pra
  MOD_RES (25)..(25): 5-Br-Trp
  source: /note="C-term Amide"
AYCQKFLWTCDSKRECCGGLVCKLWCRKEI

SEQ ID NO: 1436 - protein, 30 aa, Artificial Sequence
  source: /note="Description of Artificial Sequence: Synthetic polypeptide"
  source: /note="N-term Amino group"
  MOD_RES (1)..(1): CyA
  MOD_RES (6)..(6): hPhe
  MOD_RES (7)..(7): Nle
  MOD_RES (18)..(18): Pra
  MOD_RES (25)..(25): 5-Br-Trp
  source: /note="C-term Amide"
AYCQKFLWTCDEERACCGGLVCKLWCRKEI

SEQ ID NO: 1437 - protein, 30 aa, Artificial Sequence
  source: /note="Description of Artificial Sequence: Synthetic polypeptide"
  source: /note="N-term Amino group"
  MOD_RES (1)..(1): CyA
  MOD_RES (6)..(6): hPhe
  MOD_RES (7)..(7): Nle
  MOD_RES (18)..(18): Pra
  MOD_RES (25)..(25): 5-Br-Trp
  source: /note="C-term Amide"
AYCQKFLWTCDSERACCGELVCKLWCRKEI

SEQ ID NO: 1438 - protein, 30 aa, Artificial Sequence
  source: /note="Description of Artificial Sequence: Synthetic polypeptide"
  source: /note="N-term Amino group"
  MOD_RES (1)..(1): Pra
  MOD_RES (6)..(6): hPhe
  MOD_RES (7)..(7): Nle
  MOD_RES (25)..(25): 5-Br-Trp
  source: /note="C-term Amide"
GECQKFLWTCDSKRACCEGLVCKLWCRKEI

SEQ ID NO: 1439 - protein, 30 aa, Artificial Sequence
  source: /note="Description of Artificial Sequence: Synthetic polypeptide"
  source: /note="N-term Amino group"
  MOD_RES (1)..(1): Pra
  MOD_RES (6)..(6): hPhe
  MOD_RES (7)..(7): Nle
  MOD_RES (25)..(25): 5-Br-Trp
  source: /note="C-term Amide"
GYCQKFLWTCDEKRACCEGLVCKLWCRKEI

SEQ ID NO: 1440 - protein, 30 aa, Artificial Sequence
  source: /note="Description of Artificial Sequence: Synthetic polypeptide"
  source: /note="N-term Amino group"
  MOD_RES (1)..(1): Pra
  MOD_RES (6)..(6): hPhe
  MOD_RES (7)..(7): Nle
  MOD_RES (25)..(25): 5-Br-Trp
  source: /note="C-term Amide"
GYCQKFLWTCDSERACCEGLVCKLWCRKEI

SEQ ID NO: 1441 - protein, 30 aa, Artificial Sequence
  source: /note="Description of Artificial Sequence: Synthetic polypeptide"
  source: /note="N-term Amino group"
  MOD_RES (1)..(1): Pra
  MOD_RES (6)..(6): hPhe
  MOD_RES (7)..(7): Nle
  MOD_RES (25)..(25): 5-Br-Trp
  source: /note="C-term Amide"
GYCQKFLWTCDSKRECCEGLVCKLWCRKEI

SEQ ID NO: 1442 - protein, 30 aa, Artificial Sequence
  source: /note="Description of Artificial Sequence: Synthetic polypeptide"
  source: /note="N-term Amino group"
  MOD_RES (1)..(1): Pra
  MOD_RES (6)..(6): hPhe
  MOD_RES (7)..(7): Nle
  MOD_RES (25)..(25): 5-Br-Trp
  source: /note="C-term Amide"
GYCQKFLWTCDEERACCEGLVCKLWCRKEI

SEQ ID NO: 1443 - protein, 30 aa, Artificial Sequence
  source: /note="Description of Artificial Sequence: Synthetic polypeptide"
  source: /note="N-term Amino group"
  MOD_RES (1)..(1): Pra
  MOD_RES (6)..(6): hPhe
  MOD_RES (7)..(7): Nle
  MOD_RES (25)..(25): 5-Br-Trp
  source: /note="C-term Amide"
GYCQKFLWTCDSERACCEELVCKLWCRKEI

SEQ ID NO: 1444 - protein, 30 aa, Artificial Sequence
  source: /note="Description of Artificial Sequence: Synthetic polypeptide"
  source: /note="N-term Amino group"
  MOD_RES (1)..(1): CyA
  MOD_RES (6)..(6): hPhe
  MOD_RES (7)..(7): Nle
  MOD_RES (18)..(18): Pra
  MOD_RES (25)..(25): 5-Br-Trp
  source: /note="C-term Amide"
AECQKFLWTCDSKRACCGGLVCKLWCRKII

SEQ ID NO: 1445 - protein, 30 aa, Artificial Sequence
  source: /note="Description of Artificial Sequence: Synthetic polypeptide"
  source: /note="N-term Amino group"
  MOD_RES (1)..(1): CyA
  MOD_RES (6)..(6): hPhe
  MOD_RES (7)..(7): Nle
  MOD_RES (18)..(18): Pra
  MOD_RES (25)..(25): 5-Br-Trp
  source: /note="C-term Amide"
AYCQKFLWTCDEKRACCGGLVCKLWCRKII

SEQ ID NO: 1446 - protein, 30 aa, Artificial Sequence
  source: /note="Description of Artificial Sequence: Synthetic polypeptide"
  source: /note="N-term Amino group"
  MOD_RES (1)..(1): CyA
  MOD_RES (6)..(6): hPhe
  MOD_RES (7)..(7): Nle
  MOD_RES (18)..(18): Pra
  MOD_RES (25)..(25): 5-Br-Trp
  source: /note="C-term Amide"
AYCQKFLWTCDSERACCGGLVCKLWCRKII

SEQ ID NO: 1447 - protein, 30 aa, Artificial Sequence
  source: /note="Description of Artificial Sequence: Synthetic polypeptide"
  source: /note="N-term Amino group"
  MOD_RES (1)..(1): CyA
  MOD_RES (6)..(6): hPhe
  MOD_RES (7)..(7): Nle
  MOD_RES (18)..(18): Pra
  MOD_RES (25)..(25): 5-Br-Trp
  source: /note="C-term Amide"
AYCQKFLWTCDSKRECCGGLVCKLWCRKII

SEQ ID NO: 1448 - protein, 30 aa, Artificial Sequence
  source: /note="Description of Artificial Sequence: Synthetic polypeptide"
  source: /note="N-term Amino group"
  MOD_RES (1)..(1): CyA
  MOD_RES (6)..(6): hPhe
  MOD_RES (7)..(7): Nle
  MOD_RES (18)..(18): Pra
  MOD_RES (25)..(25): 5-Br-Trp
  source: /note="C-term Amide"
AYCQKFLWTCDEERACCGGLVCKLWCRKII

SEQ ID NO: 1449 - protein, 30 aa, Artificial Sequence
  source: /note="Description of Artificial Sequence: Synthetic polypeptide"
  source: /note="N-term Amino group"
  MOD_RES (1)..(1): CyA
  MOD_RES (6)..(6): hPhe
  MOD_RES (7)..(7): Nle
  MOD_RES (18)..(18): Pra
  MOD_RES (25)..(25): 5-Br-Trp
  source: /note="C-term Amide"
AYCQKFLWTCDSERACCGELVCKLWCRKII

SEQ ID NO: 1450 - protein, 30 aa, Artificial Sequence
  source: /note="Description of Artificial Sequence: Synthetic polypeptide"
  source: /note="N-term Amino group"
  MOD_RES (1)..(1): Pra
  MOD_RES (6)..(6): hPhe
  MOD_RES (7)..(7): Nle
  MOD_RES (25)..(25): 5-Br-Trp
  source: /note="C-term Amide"
GECQKFLWTCDSKRACCEGLVCKLWCRKII

SEQ ID NO: 1451 - protein, 30 aa, Artificial Sequence
  source: /note="Description of Artificial Sequence: Synthetic polypeptide"
  source: /note="N-term Amino group"
  MOD_RES (1)..(1): Pra
  MOD_RES (6)..(6): hPhe
  MOD_RES (7)..(7): Nle
  MOD_RES (25)..(25): 5-Br-Trp
  source: /note="C-term Amide"
GYCQKFLWTCDEKRACCEGLVCKLWCRKII

SEQ ID NO: 1452 - protein, 30 aa, Artificial Sequence
  source: /note="Description of Artificial Sequence: Synthetic polypeptide"
  source: /note="N-term Amino group"
  MOD_RES (1)..(1): Pra
  MOD_RES (6)..(6): hPhe
  MOD_RES (7)..(7): Nle
  MOD_RES (25)..(25): 5-Br-Trp
  source: /note="C-term Amide"
GYCQKFLWTCDSERACCEGLVCKLWCRKII

SEQ ID NO: 1453 - protein, 30 aa, Artificial Sequence
  source: /note="Description of Artificial Sequence: Synthetic polypeptide"
  source: /note="N-term Amino group"
  MOD_RES (1)..(1): Pra
  MOD_RES (6)..(6): hPhe
  MOD_RES (7)..(7): Nle
  MOD_RES (25)..(25): 5-Br-Trp
  source: /note="C-term Amide"
GYCQKFLWTCDSKRECCEGLVCKLWCRKII

SEQ ID NO: 1454 - protein, 30 aa, Artificial Sequence
  source: /note="Description of Artificial Sequence: Synthetic polypeptide"
  source: /note="N-term Amino group"
  MOD_RES (1)..(1): Pra
  MOD_RES (6)..(6): hPhe
  MOD_RES (7)..(7): Nle
  MOD_RES (25)..(25): 5-Br-Trp
  source: /note="C-term Amide"
GYCQKFLWTCDEERACCEGLVCKLWCRKII

SEQ ID NO: 1455 - protein, 30 aa, Artificial Sequence
  source: /note="Description of Artificial Sequence: Synthetic polypeptide"
  source: /note="N-term Amino group"
  MOD_RES (1)..(1): Pra
  MOD_RES (6)..(6): hPhe
  MOD_RES (7)..(7): Nle
  MOD_RES (25)..(25): 5-Br-Trp
  source: /note="C-term Amide"
GYCQKFLWTCDSERACCEELVCKLWCRKII

SEQ ID NO: 1456 - protein, 30 aa, Artificial Sequence
  source: /note="Description of Artificial Sequence: Synthetic polypeptide"
  source: /note="N-term Amino group"
  MOD_RES (1)..(1): CyA
  MOD_RES (7)..(7): Nle
  MOD_RES (18)..(18): Pra
  MOD_RES (24)..(24): Chg
  MOD_RES (25)..(25): 5-Br-Trp
  source: /note="C-term Amide"
AECQKWLWTCDSKRACCGGLVCKGWCRKEI

SEQ ID NO: 1457 - protein, 30 aa, Artificial Sequence
  source: /note="Description of Artificial Sequence: Synthetic polypeptide"
  source: /note="N-term Amino group"
  MOD_RES (1)..(1): CyA
  MOD_RES (7)..(7): Nle
  MOD_RES (18)..(18): Pra
  MOD_RES (24)..(24): Chg
  MOD_RES (25)..(25): 5-Br-Trp
  source: /note="C-term Amide"
AYCQKWLWTCDEKRACCGGLVCKGWCRKEI

SEQ ID NO: 1458 - protein, 30 aa, Artificial Sequence
  source: /note="Description of Artificial Sequence: Synthetic polypeptide"
  source: /note="N-term Amino group"
  MOD_RES (1)..(1): CyA
  MOD_RES (7)..(7): Nle
  MOD_RES (18)..(18): Pra
  MOD_RES (24)..(24): Chg
  MOD_RES (25)..(25): 5-Br-Trp
  source: /note="C-term Amide"
AYCQKWLWTCDSERACCGGLVCKGWCRKEI

SEQ ID NO: 1459 - protein, 30 aa, Artificial Sequence
  source: /note="Description of Artificial Sequence: Synthetic polypeptide"
  source: /note="N-term Amino group"
  MOD_RES (1)..(1): CyA
  MOD_RES (7)..(7): Nle
  MOD_RES (18)..(18): Pra
  MOD_RES (24)..(24): Chg
  MOD_RES (25)..(25): 5-Br-Trp
  source: /note="C-term Amide"
AYCQKWLWTCDSKRECCGGLVCKGWCRKEI

SEQ ID NO: 1460 - protein, 30 aa, Artificial Sequence
  source: /note="Description of Artificial Sequence: Synthetic polypeptide"
  source: /note="N-term Amino group"
  MOD_RES (1)..(1): CyA
  MOD_RES (7)..(7): Nle
  MOD_RES (18)..(18): Pra
  MOD_RES (24)..(24): Chg
  MOD_RES (25)..(25): 5-Br-Trp
  source: /note="C-term Amide"
AYCQKWLWTCDEERACCGGLVCKGWCRKEI

SEQ ID NO: 1461 - protein, 30 aa, Artificial Sequence
  source: /note="Description of Artificial Sequence: Synthetic polypeptide"
  source: /note="N-term Amino group"
  MOD_RES (1)..(1): CyA
  MOD_RES (7)..(7): Nle
  MOD_RES (18)..(18): Pra
  MOD_RES (24)..(24): Chg
  MOD_RES (25)..(25): 5-Br-Trp
  source: /note="C-term Amide"
AYCQKWLWTCDSERACCGELVCKGWCRKEI

SEQ ID NO: 1462 - protein, 30 aa, Artificial Sequence
  source: /note="Description of Artificial Sequence: Synthetic polypeptide"
  source: /note="N-term Amino group"
  MOD_RES (1)..(1): Pra
  MOD_RES (7)..(7): Nle
  MOD_RES (24)..(24): Chg
  MOD_RES (25)..(25): 5-Br-Trp
  source: /note="C-term Amide"
GECQKWLWTCDSKRACCEGLVCKGWCRKEI

SEQ ID NO: 1463 - protein, 30 aa, Artificial Sequence
  source: /note="Description of Artificial Sequence: Synthetic polypeptide"
  source: /note="N-term Amino group"
  MOD_RES (1)..(1): Pra
  MOD_RES (7)..(7): Nle
  MOD_RES (24)..(24): Chg
  MOD_RES (25)..(25): 5-Br-Trp
  source: /note="C-term Amide"
GYCQKWLWTCDEKRACCEGLVCKGWCRKEI

SEQ ID NO: 1464 - protein, 30 aa, Artificial Sequence
  source: /note="Description of Artificial Sequence: Synthetic polypeptide"
  source: /note="N-term Amino group"
  MOD_RES (1)..(1): Pra
  MOD_RES (7)..(7): Nle
  MOD_RES (24)..(24): Chg
  MOD_RES (25)..(25): 5-Br-Trp
  source: /note="C-term Amide"
GYCQKWLWTCDSERACCEGLVCKGWCRKEI

SEQ ID NO: 1465 - protein, 30 aa, Artificial Sequence
  source: /note="Description of Artificial Sequence: Synthetic polypeptide"
  source: /note="N-term Amino group"
  MOD_RES (1)..(1): Pra
  MOD_RES (7)..(7): Nle
  MOD_RES (24)..(24): Chg
  MOD_RES (25)..(25): 5-Br-Trp
  source: /note="C-term Amide"
GYCQKWLWTCDSKRECCEGLVCKGWCRKEI

SEQ ID NO: 1466 - protein, 30 aa, Artificial Sequence
  source: /note="Description of Artificial Sequence: Synthetic polypeptide"
  source: /note="N-term Amino group"
  MOD_RES (1)..(1): Pra
  MOD_RES (7)..(7): Nle
  MOD_RES (24)..(24): Chg
  MOD_RES (25)..(25): 5-Br-Trp
  source: /note="C-term Amide"
GYCQKWLWTCDEERACCEGLVCKGWCRKEI

SEQ ID NO: 1467 - protein, 30 aa, Artificial Sequence
  source: /note="Description of Artificial Sequence: Synthetic polypeptide"
  source: /note="N-term Amino group"
  MOD_RES (1)..(1): Pra
  MOD_RES (7)..(7): Nle
  MOD_RES (24)..(24): Chg
  MOD_RES (25)..(25): 5-Br-Trp
  source: /note="C-term Amide"
GYCQKWLWTCDSERACCEELVCKGWCRKEI

SEQ ID NO: 1468 - protein, 30 aa, Artificial Sequence
  source: /note="Description of Artificial Sequence: Synthetic polypeptide"
  source: /note="N-term Amino group"
  MOD_RES (1)..(1): CyA
  MOD_RES (7)..(7): Nle
  MOD_RES (18)..(18): Pra
  MOD_RES (24)..(24): Chg
  MOD_RES (25)..(25): 5-Br-Trp
  source: /note="C-term Amide"
AECQKWLWTCDSKRACCGGLVCKGWCRKII

SEQ ID NO: 1469 - protein, 30 aa, Artificial Sequence
  source: /note="Description of Artificial Sequence: Synthetic polypeptide"
  source: /note="N-term Amino group"
  MOD_RES (1)..(1): CyA
  MOD_RES (7)..(7): Nle
  MOD_RES (18)..(18): Pra
  MOD_RES (24)..(24): Chg
  MOD_RES (25)..(25): 5-Br-Trp
  source: /note="C-term Amide"
AYCQKWLWTCDEKRACCGGLVCKGWCRKII

SEQ ID NO: 1470 - protein, 30 aa, Artificial Sequence
  source: /note="Description of Artificial Sequence: Synthetic polypeptide"
  source: /note="N-term Amino group"
  MOD_RES (1)..(1): CyA
  MOD_RES (7)..(7): Nle
  MOD_RES (18)..(18): Pra
  MOD_RES (24)..(24): Chg
  MOD_RES (25)..(25): 5-Br-Trp
  source: /note="C-term Amide"
AYCQKWLWTCDSERACCGGLVCKGWCRKII

SEQ ID NO: 1471 - protein, 30 aa, Artificial Sequence
  source: /note="Description of Artificial Sequence: Synthetic polypeptide"
  source: /note="N-term Amino group"
  MOD_RES (1)..(1): CyA
  MOD_RES (7)..(7): Nle
  MOD_RES (18)..(18): Pra
  MOD_RES (24)..(24): Chg
  MOD_RES (25)..(25): 5-Br-Trp
  source: /note="C-term Amide"
AYCQKWLWTCDSKRECCGGLVCKGWCRKII

SEQ ID NO: 1472 - protein, 30 aa, Artificial Sequence
  source: /note="Description of Artificial Sequence: Synthetic polypeptide"
  source: /note="N-term Amino group"
  MOD_RES (1)..(1): CyA
  MOD_RES (7)..(7): Nle
  MOD_RES (18)..(18): Pra
  MOD_RES (24)..(24): Chg
  MOD_RES (25)..(25): 5-Br-Trp
  source: /note="C-term Amide"
AYCQKWLWTCDEERACCGGLVCKGWCRKII

SEQ ID NO: 1473 - protein, 30 aa, Artificial Sequence
  source: /note="Description of Artificial Sequence: Synthetic polypeptide"
  source: /note="N-term Amino group"
  MOD_RES (1)..(1): CyA
  MOD_RES (7)..(7): Nle
  MOD_RES (18)..(18): Pra
  MOD_RES (24)..(24): Chg
  MOD_RES (25)..(25): 5-Br-Trp
  source: /note="C-term Amide"
AYCQKWLWTCDSERACCGELVCKGWCRKII

SEQ ID NO: 1474 - protein, 30 aa, Artificial Sequence
  source: /note="Description of Artificial Sequence: Synthetic polypeptide"
  source: /note="N-term Amino group"
  MOD_RES (1)..(1): Pra
  MOD_RES (7)..(7): Nle
  MOD_RES (24)..(24): Chg
  MOD_RES (25)..(25): 5-Br-Trp
  source: /note="C-term Amide"
GECQKWLWTCDSKRACCEGLVCKGWCRKII

SEQ ID NO: 1475 - protein, 30 aa, Artificial Sequence
  source: /note="Description of Artificial Sequence: Synthetic polypeptide"
  source: /note="N-term Amino group"
  MOD_RES (1)..(1): Pra
  MOD_RES (7)..(7): Nle
  MOD_RES (24)..(24): Chg
  MOD_RES (25)..(25): 5-Br-Trp
  source: /note="C-term Amide"
GYCQKWLWTCDEKRACCEGLVCKGWCRKII

SEQ ID NO: 1476 - protein, 30 aa, Artificial Sequence
  source: /note="Description of Artificial Sequence: Synthetic polypeptide"
  source: /note="N-term Amino group"
  MOD_RES (1)..(1): Pra
  MOD_RES (7)..(7): Nle
  MOD_RES (24)..(24): Chg
  MOD_RES (25)..(25): 5-Br-Trp
  source: /note="C-term Amide"
GYCQKWLWTCDSERACCEGLVCKGWCRKII

SEQ ID NO: 1477 - protein, 30 aa, Artificial Sequence
  source: /note="Description of Artificial Sequence: Synthetic polypeptide"
  source: /note="N-term Amino group"
  MOD_RES (1)..(1): Pra
  MOD_RES (7)..(7): Nle
  MOD_RES (24)..(24): Chg
  MOD_RES (25)..(25): 5-Br-Trp
  source: /note="C-term Amide"
GYCQKWLWTCDSKRECCEGLVCKGWCRKII

SEQ ID NO: 1478 - protein, 30 aa, Artificial Sequence
  source: /note="Description of Artificial Sequence: Synthetic polypeptide"
  source: /note="N-term Amino group"
  MOD_RES (1)..(1): Pra
  MOD_RES (7)..(7): Nle
  MOD_RES (24)..(24): Chg
  MOD_RES (25)..(25): 5-Br-Trp
  source: /note="C-term Amide"
GYCQKWLWTCDEERACCEGLVCKGWCRKII

SEQ ID NO: 1479 - protein, 30 aa, Artificial Sequence
  source: /note="Description of Artificial Sequence: Synthetic polypeptide"
  source: /note="N-term Amino group"
  MOD_RES (1)..(1): Pra
  MOD_RES (7)..(7): Nle
  MOD_RES (24)..(24): Chg
  MOD_RES (25)..(25): 5-Br-Trp
  source: /note="C-term Amide"
GYCQKWLWTCDSERACCEELVCKGWCRKII

SEQ ID NO: 1480 - protein, 30 aa, Artificial Sequence
  source: /note="Description of Artificial Sequence: Synthetic polypeptide"
  source: /note="N-term Amino group"
  MOD_RES (1)..(1): CyA
  MOD_RES (7)..(7): Nle
  MOD_RES (18)..(18): Pra
  MOD_RES (25)..(25): 5-Br-Trp
  source: /note="C-term Amide"
AECQKWLWTCDSKRACCGGLVCKLWCRKEF

SEQ ID NO: 1481 - protein, 30 aa, Artificial Sequence
  source: /note="Description of Artificial Sequence: Synthetic polypeptide"
  source: /note="N-term Amino group"
  MOD_RES (1)..(1): CyA
  MOD_RES (7)..(7): Nle
  MOD_RES (18)..(18): Pra
  MOD_RES (25)..(25): 5-Br-Trp
  source: /note="C-term Amide"
AYCQKWLWTCDEKRACCGGLVCKLWCRKEF

SEQ ID NO: 1482 - protein, 30 aa, Artificial Sequence
  source: /note="Description of Artificial Sequence: Synthetic polypeptide"
  source: /note="N-term Amino group"
  MOD_RES (1)..(1): CyA
  MOD_RES (7)..(7): Nle
  MOD_RES (18)..(18): Pra
  MOD_RES (25)..(25): 5-Br-Trp
  source: /note="C-term Amide"
AYCQKWLWTCDSERACCGGLVCKLWCRKEF

SEQ ID NO: 1483 - protein, 30 aa, Artificial Sequence
  source: /note="Description of Artificial Sequence: Synthetic polypeptide"
  source: /note="N-term Amino group"
  MOD_RES (1)..(1): CyA
  MOD_RES (7)..(7): Nle
  MOD_RES (18)..(18): Pra
  MOD_RES (25)..(25): 5-Br-Trp
  source: /note="C-term Amide"
AYCQKWLWTCDSKRECCGGLVCKLWCRKEF

SEQ ID NO: 1484 - protein, 30 aa, Artificial Sequence
  source: /note="Description of Artificial Sequence: Synthetic polypeptide"
  source: /note="N-term Amino group"
  MOD_RES (1)..(1): CyA
  MOD_RES (7)..(7): Nle
  MOD_RES (18)..(18): Pra
  MOD_RES (25)..(25): 5-Br-Trp
  source: /note="C-term Amide"
AYCQKWLWTCDEERACCGGLVCKLWCRKEF

SEQ ID NO: 1485 - protein, 30 aa, Artificial Sequence
  source: /note="Description of Artificial Sequence: Synthetic polypeptide"
  source: /note="N-term Amino group"
  MOD_RES (1)..(1): CyA
  MOD_RES (7)..(7): Nle
  MOD_RES (18)..(18): Pra
  MOD_RES (25)..(25): 5-Br-Trp
  source: /note="C-term Amide"
AYCQKWLWTCDSERACCGELVCKLWCRKEF

SEQ ID NO: 1486 - protein, 30 aa, Artificial Sequence
  source: /note="Description of Artificial Sequence: Synthetic polypeptide"
  source: /note="N-term Amino group"
  MOD_RES (1)..(1): Pra
  MOD_RES (7)..(7): Nle
  MOD_RES (25)..(25): 5-Br-Trp
  source: /note="C-term Amide"
GECQKWLWTCDSKRACCEGLVCKLWCRKEF

SEQ ID NO: 1487 - protein, 30 aa, Artificial Sequence
  source: /note="Description of Artificial Sequence: Synthetic polypeptide"
  source: /note="N-term Amino group"
  MOD_RES (1)..(1): Pra
  MOD_RES (7)..(7): Nle
  MOD_RES (25)..(25): 5-Br-Trp
  source: /note="C-term Amide"
GYCQKWLWTCDEKRACCEGLVCKLWCRKEF

SEQ ID NO: 1488 - protein, 30 aa, Artificial Sequence
  source: /note="Description of Artificial Sequence: Synthetic polypeptide"
  source: /note="N-term Amino group"
  MOD_RES (1)..(1): Pra
  MOD_RES (7)..(7): Nle
  MOD_RES (25)..(25): 5-Br-Trp
  source: /note="C-term Amide"
GYCQKWLWTCDSERACCEGLVCKLWCRKEF

SEQ ID NO: 1489 - protein, 30 aa, Artificial Sequence
  source: /note="Description of Artificial Sequence: Synthetic polypeptide"
  source: /note="N-term Amino group"
  MOD_RES (1)..(1): Pra
  MOD_RES (7)..(7): Nle
  MOD_RES (25)..(25): 5-Br-Trp
  source: /note="C-term Amide"
GYCQKWLWTCDSKRECCEGLVCKLWCRKEF

SEQ ID NO: 1490 - protein, 30 aa, Artificial Sequence
  source: /note="Description of Artificial Sequence: Synthetic polypeptide"
  source: /note="N-term Amino group"
  MOD_RES (1)..(1): Pra
  MOD_RES (7)..(7): Nle
  MOD_RES (25)..(25): 5-Br-Trp
  source: /note="C-term Amide"
GYCQKWLWTCDEERACCEGLVCKLWCRKEF

SEQ ID NO: 1491 - protein, 30 aa, Artificial Sequence
  source: /note="Description of Artificial Sequence: Synthetic polypeptide"
  source: /note="N-term Amino group"
  MOD_RES (1)..(1): Pra
  MOD_RES (7)..(7): Nle
  MOD_RES (25)..(25): 5-Br-Trp
  source: /note="C-term Amide"
GYCQKWLWTCDSERACCEELVCKLWCRKEF

SEQ ID NO: 1492 - protein, 30 aa, Artificial Sequence
  source: /note="Description of Artificial Sequence: Synthetic polypeptide"
  source: /note="N-term Amino group"
  MOD_RES (1)..(1): CyA
  MOD_RES (7)..(7): Nle
  MOD_RES (18)..(18): Pra
  MOD_RES (25)..(25): 5-Br-Trp
  source: /note="C-term Amide"
AECQKWLWTCDSKRACCGGLVCKLWCRKIF

SEQ ID NO: 1493 - protein, 30 aa, Artificial Sequence
  source: /note="Description of Artificial Sequence: Synthetic polypeptide"
  source: /note="N-term Amino group"
  MOD_RES (1)..(1): CyA
  MOD_RES (7)..(7): Nle
  MOD_RES (18)..(18): Pra
  MOD_RES (25)..(25): 5-Br-Trp
  source: /note="C-term Amide"
AYCQKWLWTCDEKRACCGGLVCKLWCRKIF

SEQ ID NO: 1494 - protein, 30 aa, Artificial Sequence
  source: /note="Description of Artificial Sequence: Synthetic polypeptide"
  source: /note="N-term Amino group"
  MOD_RES (1)..(1): CyA
  MOD_RES (7)..(7): Nle
  MOD_RES (18)..(18): Pra
  MOD_RES (25)..(25): 5-Br-Trp
  source: /note="C-term Amide"
AYCQKWLWTCDSERACCGGLVCKLWCRKIF

SEQ ID NO: 1495 - protein, 30 aa, Artificial Sequence
  source: /note="Description of Artificial Sequence: Synthetic polypeptide"
  source: /note="N-term Amino group"
  MOD_RES (1)..(1): CyA
  MOD_RES (7)..(7): Nle
  MOD_RES (18)..(18): Pra
  MOD_RES (25)..(25): 5-Br-Trp
  source: /note="C-term Amide"
AYCQKWLWTCDSKRECCGGLVCKLWCRKIF

SEQ ID NO: 1496 - protein, 30 aa, Artificial Sequence
  source: /note="Description of Artificial Sequence: Synthetic polypeptide"
  source: /note="N-term Amino group"
  MOD_RES (1)..(1): CyA
  MOD_RES (7)..(7): Nle
  MOD_RES (18)..(18): Pra
  MOD_RES (25)..(25): 5-Br-Trp
  source: /note="C-term Amide"
AYCQKWLWTCDEERACCGGLVCKLWCRKIF

SEQ ID NO: 1497 - protein, 30 aa, Artificial Sequence
  source: /note="Description of Artificial Sequence: Synthetic polypeptide"
  source: /note="N-term Amino group"
  MOD_RES (1)..(1): CyA
  MOD_RES (7)..(7): Nle
  MOD_RES (18)..(18): Pra
  MOD_RES (25)..(25): 5-Br-Trp
  source: /note="C-term Amide"
AYCQKWLWTCDSERACCGELVCKLWCRKIF

SEQ ID NO: 1498 - protein, 30 aa, Artificial Sequence
  source: /note="Description of Artificial Sequence: Synthetic polypeptide"
  source: /note="N-term Amino group"
  MOD_RES (1)..(1): Pra
  MOD_RES (7)..(7): Nle
  MOD_RES (25)..(25): 5-Br-Trp
  source: /note="C-term Amide"
GECQKWLWTCDSKRACCEGLVCKLWCRKIF

SEQ ID NO: 1499 - protein, 30 aa, Artificial Sequence
  source: /note="Description of Artificial Sequence: Synthetic polypeptide"
  source: /note="N-term Amino group"
  MOD_RES (1)..(1): Pra
  MOD_RES (7)..(7): Nle
  MOD_RES (25)..(25): 5-Br-Trp
  source: /note="C-term Amide"
GYCQKWLWTCDEKRACCEGLVCKLWCRKIF

SEQ ID NO: 1500 - protein, 30 aa, Artificial Sequence
  source: /note="Description of Artificial Sequence: Synthetic polypeptide"
  source: /note="N-term Amino group"
  MOD_RES (1)..(1): Pra
  MOD_RES (7)..(7): Nle
  MOD_RES (25)..(25): 5-Br-Trp
  source: /note="C-term Amide"
GYCQKWLWTCDSERACCEGLVCKLWCRKIF

SEQ ID NO: 1501 - protein, 30 aa, Artificial Sequence
  source: /note="Description of Artificial Sequence: Synthetic polypeptide"
  source: /note="N-term Amino group"
  MOD_RES (1)..(1): Pra
  MOD_RES (7)..(7): Nle
  MOD_RES (25)..(25): 5-Br-Trp
  source: /note="C-term Amide"
GYCQKWLWTCDSKRECCEGLVCKLWCRKIF

SEQ ID NO: 1502 - protein, 30 aa, Artificial Sequence
  source: /note="Description of Artificial Sequence: Synthetic polypeptide"
  source: /note="N-term Amino group"
  MOD_RES (1)..(1): Pra
  MOD_RES (7)..(7): Nle
  MOD_RES (25)..(25): 5-Br-Trp
  source: /note="C-term Amide"
GYCQKWLWTCDEERACCEGLVCKLWCRKIF

SEQ ID NO: 1503 - protein, 30 aa, Artificial Sequence
  source: /note="Description of Artificial Sequence: Synthetic polypeptide"
  source: /note="N-term Amino group"
  MOD_RES (1)..(1): Pra
  MOD_RES (7)..(7): Nle
  MOD_RES (25)..(25): 5-Br-Trp
  source: /note="C-term Amide"
GYCQKWLWTCDSERACCEELVCKLWCRKIF

SEQ ID NO: 1504 - protein, 30 aa, Artificial Sequence; identical to SEQ ID NO: 359
  source: /note="Description of Artificial Sequence: Synthetic polypeptide"
  source: /note="N-term Amino group"
  MOD_RES (1)..(1): hPra
  MOD_RES (7)..(7): Nle
  source: /note="C-term Amide"

SEQ ID NO: 1505 - protein, 30 aa, Artificial Sequence; identical to SEQ ID NO: 391
  source: /note="Description of Artificial Sequence: Synthetic polypeptide"
  source: /note="N-term Amino group"
  MOD_RES (1)..(1): CyA
  MOD_RES (2)..(2): hPra
  MOD_RES (7)..(7): Nle
  source: /note="C-term Amide"

SEQ ID NO: 1506 - protein, 30 aa, Artificial Sequence; identical to SEQ ID NO: 389
  source: /note="Description of Artificial Sequence: Synthetic polypeptide"
  source: /note="N-term Amino group"
  MOD_RES (1)..(1): CyA
  MOD_RES (7)..(7): Nle
  MOD_RES (12)..(12): hPra
  source: /note="C-term Amide"

SEQ ID NO: 1507 - protein, 30 aa, Artificial Sequence
  source: /note="Description of Artificial Sequence: Synthetic polypeptide"
  source: /note="N-term Amino group"
  MOD_RES (1)..(1): CyA
  MOD_RES (7)..(7): Nle
  MOD_RES (13)..(13): hPra
  source: /note="C-term Amide"
AYCQKWLWTCDSGRACCEGLRCKLWCRKII

SEQ ID NO: 1508 - protein, 30 aa, Artificial Sequence
  source: /note="Description of Artificial Sequence: Synthetic polypeptide"
  source: /note="N-term Amino group"
  MOD_RES (1)..(1): CyA
  MOD_RES (7)..(7): Nle
  MOD_RES (15)..(15): hPra
  source: /note="C-term Amide"
AYCQKWLWTCDSKRGCCEGLRCKLWCRKII

SEQ ID NO: 1509 - protein, 30 aa, Artificial Sequence; identical to SEQ ID NO: 388
  source: /note="Description of Artificial Sequence: Synthetic polypeptide"
  source: /note="N-term Amino group"
  MOD_RES (1)..(1): CyA
  MOD_RES (7)..(7): Nle
  MOD_RES (18)..(18): hPra
  source: /note="C-term Amide"

SEQ ID NO: 1510 - protein, 30 aa, Artificial Sequence; identical to SEQ ID NO: 328
  source: /note="Description of Artificial Sequence: Synthetic polypeptide"
  source: /note="N-term Amino group"
  MOD_RES (1)..(1): hPra
  MOD_RES (7)..(7): Nle
  source: /note="C-term Amide"

SEQ ID NO: 1511 - protein, 30 aa, Artificial Sequence; identical to SEQ ID NO: 518
  source: /note="Description of Artificial Sequence: Synthetic polypeptide"
  source: /note="N-term Amino group"
  MOD_RES (1)..(1): CyA
  MOD_RES (2)..(2): hPra
  MOD_RES (7)..(7): Nle
  source: /note="C-term Amide"

SEQ ID NO: 1512 - protein, 30 aa, Artificial Sequence; identical to SEQ ID NO: 520
  source: /note="Description of Artificial Sequence: Synthetic polypeptide"
  source: /note="N-term Amino group"
  MOD_RES (1)..(1): CyA
  MOD_RES (7)..(7): Nle
  MOD_RES (12)..(12): hPra
  source: /note="C-term Amide"

SEQ ID NO: 1513 - protein, 30 aa, Artificial Sequence; identical to SEQ ID NO: 521
  source: /note="Description of Artificial Sequence: Synthetic polypeptide"
  source: /note="N-term Amino group"
  MOD_RES (1)..(1): CyA
  MOD_RES (7)..(7): Nle
  MOD_RES (13)..(13): hPra
  source: /note="C-term Amide"

SEQ ID NO: 1514 - protein, 30 aa, Artificial Sequence
  source: /note="Description of Artificial Sequence: Synthetic polypeptide"
  source: /note="N-term Amino group"
  MOD_RES (1)..(1): CyA
  MOD_RES (7)..(7): Nle
  MOD_RES (15)..(15): hPra
  source: /note="C-term Amide"
AYCQKWLWTCDSKRGCCEGLRCKLWCRKEI

SEQ ID NO: 1515 - protein, 30 aa, Artificial Sequence; identical to SEQ ID NO: 395
  source: /note="Description of Artificial Sequence: Synthetic polypeptide"
  source: /note="N-term Amino group"
  MOD_RES (1)..(1): CyA
  MOD_RES (7)..(7): Nle
  MOD_RES (18)..(18): hPra
  source: /note="C-term Amide"

SEQ ID NO: 1516 - protein, 30 aa, Artificial Sequence; identical to SEQ ID NO: 359
  source: /note="Description of Artificial Sequence: Synthetic polypeptide"
  source: /note="N-term Amino group"
  MOD_RES (1)..(1): BhPra
  MOD_RES (7)..(7): Nle
  source: /note="C-term Amide"

SEQ ID NO: 1517 - protein, 30 aa, Artificial Sequence; identical to SEQ ID NO: 391
  source: /note="Description of Artificial Sequence: Synthetic polypeptide"
  source: /note="N-term Amino group"
  MOD_RES (1)..(1): CyA
  MOD_RES (2)..(2): BhPra
  MOD_RES (7)..(7): Nle
  source: /note="C-term Amide"

SEQ ID NO: 1518 - protein, 30 aa, Artificial Sequence; identical to SEQ ID NO: 389
  source: /note="Description of Artificial Sequence: Synthetic polypeptide"
  source: /note="N-term Amino group"
  MOD_RES (1)..(1): CyA
  MOD_RES (7)..(7): Nle
  MOD_RES (12)..(12): BhPra
  source: /note="C-term Amide"

SEQ ID NO: 1519 - protein, 30 aa, Artificial Sequence; identical to SEQ ID NO: 1507
  source: /note="Description of Artificial Sequence: Synthetic polypeptide"
  source: /note="N-term Amino group"
  MOD_RES (1)..(1): CyA
  MOD_RES (7)..(7): Nle
  MOD_RES (13)..(13): BhPra
  source: /note="C-term Amide"

SEQ ID NO: 1520 - protein, 30 aa, Artificial Sequence; identical to SEQ ID NO: 1508
  source: /note="Description of Artificial Sequence: Synthetic polypeptide"
  source: /note="N-term Amino group"
  MOD_RES (1)..(1): CyA
  MOD_RES (7)..(7): Nle
  MOD_RES (15)..(15): BhPra
  source: /note="C-term Amide"

SEQ ID NO: 1521 - protein, 30 aa, Artificial Sequence; identical to SEQ ID NO: 388
  source: /note="Description of Artificial Sequence: Synthetic polypeptide"
  source: /note="N-term Amino group"
  MOD_RES (1)..(1): CyA
  MOD_RES (7)..(7): Nle
  MOD_RES (18)..(18): BhPra
  source: /note="C-term Amide"

SEQ ID NO: 1522 - protein, 30 aa, Artificial Sequence; identical to SEQ ID NO: 328
  source: /note="Description of Artificial Sequence: Synthetic polypeptide"
  source: /note="N-term Amino group"
  MOD_RES (1)..(1): BhPra
  MOD_RES (7)..(7): Nle
  source: /note="C-term Amide"

SEQ ID NO: 1523 - protein, 30 aa, Artificial Sequence; identical to SEQ ID NO: 518
  source: /note="Description of Artificial Sequence: Synthetic polypeptide"
  source: /note="N-term Amino group"
  MOD_RES (1)..(1): CyA
  MOD_RES (2)..(2): BhPra
  MOD_RES (7)..(7): Nle
  source: /note="C-term Amide"

SEQ ID NO: 1524 - protein, 30 aa, Artificial Sequence; identical to SEQ ID NO: 520
  source: /note="Description of Artificial Sequence: Synthetic polypeptide"
  source: /note="N-term Amino group"
  MOD_RES (1)..(1): CyA
  MOD_RES (7)..(7): Nle
  MOD_RES (12)..(12): BhPra
  source: /note="C-term Amide"

SEQ ID NO: 1525 - protein, 30 aa, Artificial Sequence; identical to SEQ ID NO: 521
  source: /note="Description of Artificial Sequence: Synthetic polypeptide"
  source: /note="N-term Amino group"
  MOD_RES (1)..(1): CyA
  MOD_RES (7)..(7): Nle
  MOD_RES (13)..(13): BhPra
  source: /note="C-term Amide"

SEQ ID NO: 1526 - protein, 30 aa, Artificial Sequence; identical to SEQ ID NO: 1514
  source: /note="Description of Artificial Sequence: Synthetic polypeptide"
  source: /note="N-term Amino group"
  MOD_RES (1)..(1): CyA
  MOD_RES (7)..(7): Nle
  MOD_RES (15)..(15): BhPra
  source: /note="C-term Amide"

SEQ ID NO: 1527 - protein, 30 aa, Artificial Sequence; identical to SEQ ID NO: 395
  source: /note="Description of Artificial Sequence: Synthetic polypeptide"
  source: /note="N-term Amino group"
  MOD_RES (1)..(1): CyA
  MOD_RES (7)..(7): Nle
  MOD_RES (18)..(18): BhPra
  source: /note="C-term Amide"

SEQ ID NO: 1528 - protein, 30 aa, Artificial Sequence; identical to SEQ ID NO: 358
  source: /note="Description of Artificial Sequence: Synthetic polypeptide"
  source: /note="N-term Amino group"
  MOD_RES (1)..(1): EPA
  MOD_RES (7)..(7): Nle
  source: /note="C-term Amide"

SEQ ID NO: 1529 - protein, 30 aa, Artificial Sequence
  source: /note="Description of Artificial Sequence: Synthetic polypeptide"
  source: /note="N-term Amino group"
  MOD_RES (1)..(1): CyA
  MOD_RES (2)..(2): EPA
  MOD_RES (7)..(7): Nle
  source: /note="C-term Amide"
AFCQKWLWTCDSKRACCEGLRCKLWCRKII

SEQ ID NO: 1530 - protein, 30 aa, Artificial Sequence
  source: /note="Description of Artificial Sequence: Synthetic polypeptide"
  source: /note="N-term Amino group"
  MOD_RES (1)..(1): CyA
  MOD_RES (7)..(7): Nle
  MOD_RES (12)..(12): EPA
  source: /note="C-term Amide"
AYCQKWLWTCDFKRACCEGLRCKLWCRKII

SEQ ID NO: 1531 - protein, 30 aa, Artificial Sequence
  source: /note="Description of Artificial Sequence: Synthetic polypeptide"
  source: /note="N-term Amino group"
  MOD_RES (1)..(1): CyA
  MOD_RES (7)..(7): Nle
  MOD_RES (13)..(13): EPA
  source: /note="C-term Amide"
AYCQKWLWTCDSFRACCEGLRCKLWCRKII

SEQ ID NO: 1532 - protein, 30 aa, Artificial Sequence
  source: /note="Description of Artificial Sequence: Synthetic polypeptide"
  source: /note="N-term Amino group"
  MOD_RES (1)..(1): CyA
  MOD_RES (7)..(7): Nle
  MOD_RES (15)..(15): EPA
  source: /note="C-term Amide"
AYCQKWLWTCDSKRFCCEGLRCKLWCRKII

SEQ ID NO: 1533 - protein, 30 aa, Artificial Sequence
  source: /note="Description of Artificial Sequence: Synthetic polypeptide"
  source: /note="N-term Amino group"
  MOD_RES (1)..(1): CyA
  MOD_RES (7)..(7): Nle
  MOD_RES (18)..(18): EPA
  source: /note="C-term Amide"
AYCQKWLWTCDSKRACCFGLRCKLWCRKII

SEQ ID NO: 1534 - protein, 30 aa, Artificial Sequence
  source: /note="Description of Artificial Sequence: Synthetic polypeptide"
  source: /note="N-term Amino group"
  MOD_RES (1)..(1): EPA
  MOD_RES (7)..(7): Nle
  source: /note="C-term Amide"
FYCQKWLWTCDSKRACCEGLRCKLWCRKEI

SEQ ID NO: 1535 - protein, 30 aa, Artificial Sequence
  source: /note="Description of Artificial Sequence: Synthetic polypeptide"
  source: /note="N-term Amino group"
  MOD_RES (1)..(1): CyA
  MOD_RES (2)..(2): EPA
  MOD_RES (7)..(7): Nle
  source: /note="C-term Amide"
AFCQKWLWTCDSKRACCEGLRCKLWCRKEI

SEQ ID NO: 1536 - protein, 30 aa, Artificial Sequence
  source: /note="Description of Artificial Sequence: Synthetic polypeptide"
  source: /note="N-term Amino group"
  MOD_RES (1)..(1): CyA
  MOD_RES (7)..(7): Nle
  MOD_RES (12)..(12): EPA
  source: /note="C-term Amide"
AYCQKWLWTCDFKRACCEGLRCKLWCRKEI

SEQ ID NO: 1537 - protein, 30 aa, Artificial Sequence
  source: /note="Description of Artificial Sequence: Synthetic polypeptide"
  source: /note="N-term Amino group"
  MOD_RES (1)..(1): CyA
  MOD_RES (7)..(7): Nle
  MOD_RES (13)..(13): EPA
  source: /note="C-term Amide"
AYCQKWLWTCDSFRACCEGLRCKLWCRKEI

SEQ ID NO: 1538 - protein, 30 aa, Artificial Sequence
  source: /note="Description of Artificial Sequence: Synthetic polypeptide"
  source: /note="N-term Amino group"
  MOD_RES (1)..(1): CyA
  MOD_RES (7)..(7): Nle
  MOD_RES (15)..(15): EPA
  source: /note="C-term Amide"
AYCQKWLWTCDSKRFCCEGLRCKLWCRKEI

SEQ ID NO: 1539 - protein, 30 aa, Artificial Sequence
  source: /note="Description of Artificial Sequence: Synthetic polypeptide"
  source: /note="N-term Amino group"
  MOD_RES (1)..(1): CyA
  MOD_RES (7)..(7): Nle
  MOD_RES (18)..(18): EPA
  source: /note="C-term Amide"
AYCQKWLWTCDSKRACCFGLRCKLWCRKEI

SEQ ID NO: 1540 - protein, 30 aa, Artificial Sequence; identical to SEQ ID NO: 843
  source: /note="Description of Artificial Sequence: Synthetic polypeptide"
  source: /note="N-term Amino group"
  MOD_RES (1)..(1): Pra
  MOD_RES (6)..(6): 4-Clh-Phe
  MOD_RES (7)..(7): Nle
  source: /note="C-term Amide"

SEQ ID NO: 1541 - protein, 30 aa, Artificial Sequence; identical to SEQ ID NO: 843
  source: /note="Description of Artificial Sequence: Synthetic polypeptide"
  source: /note="N-term Amino group"
  MOD_RES (1)..(1): Pra
  MOD_RES (6)..(6): 4-Pheh-Phe
  MOD_RES (7)..(7): Nle
  source: /note="C-term Amide"

SEQ ID NO: 1542 - protein, 30 aa, Artificial Sequence; identical to SEQ ID NO: 843
  source: /note="Description of Artificial Sequence: Synthetic polypeptide"
  source: /note="N-term Amino group"
  MOD_RES (1)..(1): Pra
  MOD_RES (6)..(6): 4-Meh-Phe
  MOD_RES (7)..(7): Nle
  source: /note="C-term Amide"

SEQ ID NO: 1543 - protein, 30 aa, Artificial Sequence; identical to SEQ ID NO: 843
  source: /note="Description of Artificial Sequence: Synthetic polypeptide"
  source: /note="N-term Amino group"
  MOD_RES (1)..(1): Pra
  MOD_RES (6)..(6): 4-MeOh-Phe
  MOD_RES (7)..(7): Nle
  source: /note="C-term Amide"

SEQ ID NO: 1544 - protein, 30 aa, Artificial Sequence; identical to SEQ ID NO: 843
  source: /note="Description of Artificial Sequence: Synthetic polypeptide"
  source: /note="N-term Amino group"
  MOD_RES (1)..(1): Pra
  MOD_RES (6)..(6): 3-Brh-Phe
  MOD_RES (7)..(7): Nle
  source: /note="C-term Amide"

SEQ ID NO: 1545 - protein, 30 aa, Artificial Sequence; identical to SEQ ID NO: 843
  source: /note="Description of Artificial Sequence: Synthetic polypeptide"
  source: /note="N-term Amino group"
  MOD_RES (1)..(1): Pra
  MOD_RES (6)..(6): 3-Clh-Phe
  MOD_RES (7)..(7): Nle
  source: /note="C-term Amide"

SEQ ID NO: 1546 - protein, 30 aa, Artificial Sequence; identical to SEQ ID NO: 843
  source: /note="Description of Artificial Sequence: Synthetic polypeptide"
  source: /note="N-term Amino group"
  MOD_RES (1)..(1): Pra
  MOD_RES (6)..(6): 3-Pheh-Phe
  MOD_RES (7)..(7): Nle
  source: /note="C-term Amide"

SEQ ID NO: 1547 - protein, 30 aa, Artificial Sequence; identical to SEQ ID NO: 843
  source: /note="Description of Artificial Sequence: Synthetic polypeptide"
  source: /note="N-term Amino group"
  MOD_RES (1)..(1): Pra
  MOD_RES (6)..(6): 3-Meh-Phe
  MOD_RES (7)..(7): Nle
  source: /note="C-term Amide"

SEQ ID NO: 1548 - protein, 30 aa, Artificial Sequence; identical to SEQ ID NO: 843
  source: /note="Description of Artificial Sequence: Synthetic polypeptide"
  source: /note="N-term Amino group"
  MOD_RES (1)..(1): Pra
  MOD_RES (6)..(6): 3-MeOh-Phe
  MOD_RES (7)..(7): Nle
  source: /note="C-term Amide"

SEQ ID NO: 1549 - protein, 30 aa, Artificial Sequence; identical to SEQ ID NO: 843
  source: /note="Description of Artificial Sequence: Synthetic polypeptide"
  source: /note="N-term Amino group"
  MOD_RES (1)..(1): Pra
  MOD_RES (6)..(6): 2-Brh-Phe
  MOD_RES (7)..(7): Nle
  source: /note="C-term Amide"

SEQ ID NO: 1550 - protein, 30 aa, Artificial Sequence; identical to SEQ ID NO: 843
  source: /note="Description of Artificial Sequence: Synthetic polypeptide"
  source: /note="N-term Amino group"
  MOD_RES (1)..(1): Pra
  MOD_RES (6)..(6): 2-Clh-Phe
  MOD_RES (7)..(7): Nle
  source: /note="C-term Amide"

SEQ ID NO: 1551 - protein, 30 aa, Artificial Sequence; identical to SEQ ID NO: 843
  source: /note="Description of Artificial Sequence: Synthetic polypeptide"
  source: /note="N-term Amino group"
  MOD_RES (1)..(1): Pra
  MOD_RES (6)..(6): 2-Pheh-Phe
  MOD_RES (7)..(7): Nle
  source: /note="C-term Amide"

SEQ ID NO: 1552 - protein, 30 aa, Artificial Sequence; identical to SEQ ID NO: 843
  source: /note="Description of Artificial Sequence: Synthetic polypeptide"
  source: /note="N-term Amino group"
  MOD_RES (1)..(1): Pra
  MOD_RES (6)..(6): 2-Meh-Phe
  MOD_RES (7)..(7): Nle
  source: /note="C-term Amide"

SEQ ID NO: 1553 - protein, 30 aa, Artificial Sequence; identical to SEQ ID NO: 843
  source: /note="Description of Artificial Sequence: Synthetic polypeptide"
  source: /note="N-term Amino group"
  MOD_RES (1)..(1): Pra
  MOD_RES (6)..(6): 2-MeOh-Phe
  MOD_RES (7)..(7): Nle
  source: /note="C-term Amide"

SEQ ID NO: 1554 - protein, 30 aa, Artificial Sequence; identical to SEQ ID NO: 878
  source: /note="Description of Artificial Sequence: Synthetic polypeptide"
  source: /note="N-term Amino group"
  MOD_RES (1)..(1): Pra
  MOD_RES (6)..(6): 4-Clh-Phe
  MOD_RES (7)..(7): Nle
  MOD_RES (30)..(30): Cha
  source: /note="C-term Amide"

SEQ ID NO: 1555 - protein, 30 aa, Artificial Sequence; identical to SEQ ID NO: 878
  source: /note="Description of Artificial Sequence: Synthetic polypeptide"
  source: /note="N-term Amino group"
  MOD_RES (1)..(1): Pra
  MOD_RES (6)..(6): 4-Pheh-Phe
  MOD_RES (7)..(7): Nle
  MOD_RES (30)..(30): Cha
  source: /note="C-term Amide"

SEQ ID NO: 1556 - protein, 30 aa, Artificial Sequence; identical to SEQ ID NO: 878
  source: /note="Description of Artificial Sequence: Synthetic polypeptide"
  source: /note="N-term Amino group"
  MOD_RES (1)..(1): Pra
  MOD_RES (6)..(6): 4-Meh-Phe
  MOD_RES (7)..(7): Nle
  MOD_RES (30)..(30): Cha
  source: /note="C-term Amide"

SEQ ID NO: 1557 - protein, 30 aa, Artificial Sequence; identical to SEQ ID NO: 878
  source: /note="Description of Artificial Sequence: Synthetic polypeptide"
  source: /note="N-term Amino group"
  MOD_RES (1)..(1): Pra
  MOD_RES (6)..(6): 4-MeOh-Phe
  MOD_RES (7)..(7): Nle
  MOD_RES (30)..(30): Cha
  source: /note="C-term Amide"

SEQ ID NO: 1558 - protein, 30 aa, Artificial Sequence; identical to SEQ ID NO: 878
  source: /note="Description of Artificial Sequence: Synthetic polypeptide"
  source: /note="N-term Amino group"
  MOD_RES (1)..(1): Pra
  MOD_RES (6)..(6): 3-Brh-Phe
  MOD_RES (7)..(7): Nle
  MOD_RES (30)..(30): Cha
  source: /note="C-term Amide"

SEQ ID NO: 1559 - protein, 30 aa, Artificial Sequence; identical to SEQ ID NO: 878
  source: /note="Description of Artificial Sequence: Synthetic polypeptide"
  source: /note="N-term Amino group"
  MOD_RES (1)..(1): Pra
  MOD_RES (6)..(6): 3-Clh-Phe
  MOD_RES (7)..(7): Nle
  MOD_RES (30)..(30): Cha
  source: /note="C-term Amide"

SEQ ID NO: 1560 - protein, 30 aa, Artificial Sequence; identical to SEQ ID NO: 878
  source: /note="Description of Artificial Sequence: Synthetic polypeptide"
  source: /note="N-term Amino group"
  MOD_RES (1)..(1): Pra
  MOD_RES (6)..(6): 3-Pheh-Phe
  MOD_RES (7)..(7): Nle
  MOD_RES (30)..(30): Cha
  source: /note="C-term Amide"

SEQ ID NO: 1561 - protein, 30 aa, Artificial Sequence; identical to SEQ ID NO: 878
  source: /note="Description of Artificial Sequence: Synthetic polypeptide"
  source: /note="N-term Amino group"
  MOD_RES (1)..(1): Pra
  MOD_RES (6)..(6): 3-Meh-Phe
  MOD_RES (7)..(7): Nle
  MOD_RES (30)..(30): Cha
  source: /note="C-term Amide"

SEQ ID NO: 1562 - protein, 30 aa, Artificial Sequence; identical to SEQ ID NO: 878
  source: /note="Description of Artificial Sequence: Synthetic polypeptide"
  source: /note="N-term Amino group"
  MOD_RES (1)..(1): Pra
  MOD_RES (6)..(6): 3-MeOh-Phe
  MOD_RES (7)..(7): Nle
  MOD_RES (30)..(30): Cha
  source: /note="C-term Amide"

SEQ ID NO: 1563 - protein, 30 aa, Artificial Sequence; identical to SEQ ID NO: 878
  source: /note="Description of Artificial Sequence: Synthetic polypeptide"
  source: /note="N-term Amino group"
  MOD_RES (1)..(1): Pra
  MOD_RES (6)..(6): 2-Brh-Phe
  MOD_RES (7)..(7): Nle
  MOD_RES (30)..(30): Cha
  source: /note="C-term Amide"

SEQ ID NO: 1564 - protein, 30 aa, Artificial Sequence; identical to SEQ ID NO: 878
  source: /note="Description of Artificial Sequence: Synthetic polypeptide"
  source: /note="N-term Amino group"
  MOD_RES (1)..(1): Pra
  MOD_RES (6)..(6): 2-Clh-Phe
  MOD_RES (7)..(7): Nle
  MOD_RES (30)..(30): Cha
  source: /note="C-term Amide"

SEQ ID NO: 1565 - protein, 30 aa, Artificial Sequence; identical to SEQ ID NO: 878
  source: /note="Description of Artificial Sequence: Synthetic polypeptide"
  source: /note="N-term Amino group"
  MOD_RES (1)..(1): Pra
  MOD_RES (6)..(6): 2-Pheh-Phe
  MOD_RES (7)..(7): Nle
  MOD_RES (30)..(30): Cha
  source: /note="C-term Amide"

SEQ ID NO: 1566 - protein, 30 aa, Artificial Sequence; identical to SEQ ID NO: 878
  source: /note="Description of Artificial Sequence: Synthetic polypeptide"
  source: /note="N-term Amino group"
  MOD_RES (1)..(1): Pra
  MOD_RES (6)..(6): 2-Meh-Phe
  MOD_RES (7)..(7): Nle
  MOD_RES (30)..(30): Cha
  source: /note="C-term Amide"

SEQ ID NO: 1567 - protein, 30 aa, Artificial Sequence; identical to SEQ ID NO: 878
  source: /note="Description of Artificial Sequence: Synthetic polypeptide"
  source: /note="N-term Amino group"
  MOD_RES (1)..(1): Pra
  MOD_RES (6)..(6): 2-MeOh-Phe
  MOD_RES (7)..(7): Nle
  MOD_RES (30)..(30): Cha
  source: /note="C-term Amide"

SEQ ID NO: 1568 - protein, 30 aa, Artificial Sequence; identical to SEQ ID NO: 864
  source: /note="Description of Artificial Sequence: Synthetic polypeptide"
  source: /note="N-term Amino group"
  MOD_RES (1)..(1): CyA
  MOD_RES (6)..(6): 4-Clh-Phe
  MOD_RES (7)..(7): Nle
  MOD_RES (18)..(18): Pra
  source: /note="C-term Amide"

SEQ ID NO: 1569 - protein, 30 aa, Artificial Sequence; identical to SEQ ID NO: 864
  source: /note="Description of Artificial Sequence: Synthetic polypeptide"
  source: /note="N-term Amino group"
  MOD_RES (1)..(1): CyA
  MOD_RES (6)..(6): 4-Pheh-Phe
  MOD_RES (7)..(7): Nle
  MOD_RES (18)..(18): Pra
  source: /note="C-term Amide"

SEQ ID NO: 1570 - protein, 30 aa, Artificial Sequence; identical to SEQ ID NO: 864
  source: /note="Description of Artificial Sequence: Synthetic polypeptide"
  source: /note="N-term Amino group"
  MOD_RES (1)..(1): CyA
  MOD_RES (6)..(6): 4-Meh-Phe
  MOD_RES (7)..(7): Nle
  MOD_RES (18)..(18): Pra
  source: /note="C-term Amide"

SEQ ID NO: 1571 - protein, 30 aa, Artificial Sequence; identical to SEQ ID NO: 864
  source: /note="Description of Artificial Sequence: Synthetic polypeptide"
  source: /note="N-term Amino group"
  MOD_RES (1)..(1): CyA
  MOD_RES (6)..(6): 4-MeOh-Phe
  MOD_RES (7)..(7): Nle
  MOD_RES (18)..(18): Pra
  source: /note="C-term Amide"

SEQ ID NO: 1572 - protein, 30 aa, Artificial Sequence; identical to SEQ ID NO: 864
  source: /note="Description of Artificial Sequence: Synthetic polypeptide"
  source: /note="N-term Amino group"
  MOD_RES (1)..(1): CyA
  MOD_RES (6)..(6): 3-Brh-Phe
  MOD_RES (7)..(7): Nle
  MOD_RES (18)..(18): Pra
  source: /note="C-term Amide"

SEQ ID NO: 1573 - protein, 30 aa, Artificial Sequence; identical to SEQ ID NO: 864
  source: /note="Description of Artificial Sequence: Synthetic polypeptide"
  source: /note="N-term Amino group"
  MOD_RES (1)..(1): CyA
  MOD_RES (6)..(6): 3-Clh-Phe
  MOD_RES (7)..(7): Nle
  MOD_RES (18)..(18): Pra
  source: /note="C-term Amide"

SEQ ID NO: 1574 - protein, 30 aa, Artificial Sequence; identical to SEQ ID NO: 864
  source: /note="Description of Artificial Sequence: Synthetic polypeptide"
  source: /note="N-term Amino group"
  MOD_RES (1)..(1): CyA
  MOD_RES (6)..(6): 3-Pheh-Phe
  MOD_RES (7)..(7): Nle
  MOD_RES (18)..(18): Pra
  source: /note="C-term Amide"

SEQ ID NO: 1575 - protein, 30 aa, Artificial Sequence; identical to SEQ ID NO: 864
  source: /note="Description of Artificial Sequence: Synthetic polypeptide"
  source: /note="N-term Amino group"
  MOD_RES (1)..(1): CyA
  MOD_RES (6)..(6): 3-Meh-Phe
  MOD_RES (7)..(7): Nle
  MOD_RES (18)..(18): Pra
  source: /note="C-term Amide"

SEQ ID NO: 1576 - protein, 30 aa, Artificial Sequence; identical to SEQ ID NO: 864
  source: /note="Description of Artificial Sequence: Synthetic polypeptide"
  source: /note="N-term Amino group"
  MOD_RES (1)..(1): CyA
  MOD_RES (6)..(6): 3-MeOh-Phe
  MOD_RES (7)..(7): Nle
  MOD_RES (18)..(18): Pra
  source: /note="C-term Amide"

SEQ ID NO: 1577 - protein, 30 aa, Artificial Sequence; identical to SEQ ID NO: 864
  source: /note="Description of Artificial Sequence: Synthetic polypeptide"
  source: /note="N-term Amino group"
  MOD_RES (1)..(1): CyA
  MOD_RES (6)..(6): 2-Brh-Phe
  MOD_RES (7)..(7): Nle
  MOD_RES (18)..(18): Pra
  source: /note="C-term Amide"

SEQ ID NO: 1578 - protein, 30 aa, Artificial Sequence; identical to SEQ ID NO: 864
  source: /note="Description of Artificial Sequence: Synthetic polypeptide"
  source: /note="N-term Amino group"
  MOD_RES (1)..(1): CyA
  MOD_RES (6)..(6): 2-Clh-Phe
  MOD_RES (7)..(7): Nle
  MOD_RES (18)..(18): Pra
  source: /note="C-term Amide"

SEQ ID NO: 1579 - protein, 30 aa, Artificial Sequence; identical to SEQ ID NO: 864
  source: /note="Description of Artificial Sequence: Synthetic polypeptide"
  source: /note="N-term Amino group"
  MOD_RES (1)..(1): CyA
  MOD_RES (6)..(6): 2-Pheh-Phe
  MOD_RES (7)..(7): Nle
  MOD_RES (18)..(18): Pra
  source: /note="C-term Amide"

SEQ ID NO: 1580 - protein, 30 aa, Artificial Sequence; identical to SEQ ID NO: 864
  source: /note="Description of Artificial Sequence: Synthetic polypeptide"
  source: /note="N-term Amino group"
  MOD_RES (1)..(1): CyA
  MOD_RES (6)..(6): 2-Meh-Phe
  MOD_RES (7)..(7): Nle
  MOD_RES (18)..(18): Pra
  source: /note="C-term Amide"

SEQ ID NO: 1581 - protein, 30 aa, Artificial Sequence; identical to SEQ ID NO: 864
  source: /note="Description of Artificial Sequence: Synthetic polypeptide"
  source: /note="N-term Amino group"
  MOD_RES (1)..(1): CyA
  MOD_RES (6)..(6): 2-MeOh-Phe
  MOD_RES (7)..(7): Nle
  MOD_RES (18)..(18): Pra
  source: /note="C-term Amide"

SEQ ID NO: 1582 - protein, 30 aa, Artificial Sequence
  source: /note="Description of Artificial Sequence: Synthetic polypeptide"
  source: /note="N-term Amino group"
  MOD_RES (1)..(1): CyA
  MOD_RES (6)..(6): 4-Clh-Phe
  MOD_RES (7)..(7): Nle
  MOD_RES (18)..(18): Pra
  MOD_RES (30)..(30): Cha
  source: /note="C-term Amide"
AYCQKFLWTCDSKRACCGGLRCKLWCRKEA

SEQ ID NO: 1583 - protein, 30 aa, Artificial Sequence; identical to SEQ ID NO: 1582
  source: /note="Description of Artificial Sequence: Synthetic polypeptide"
  source: /note="N-term Amino group"
  MOD_RES (1)..(1): CyA
  MOD_RES (6)..(6): 4-Pheh-Phe
  MOD_RES (7)..(7): Nle
  MOD_RES (18)..(18): Pra
  MOD_RES (30)..(30): Cha
  source: /note="C-term Amide"

SEQ ID NO: 1584 - protein, 30 aa, Artificial Sequence; identical to SEQ ID NO: 1582
  source: /note="Description of Artificial Sequence: Synthetic polypeptide"
  source: /note="N-term Amino group"
  MOD_RES (1)..(1): CyA
  MOD_RES (6)..(6): 4-Meh-Phe
  MOD_RES (7)..(7): Nle
  MOD_RES (18)..(18): Pra
  MOD_RES (30)..(30): Cha
  source: /note="C-term Amide"

SEQ ID NO: 1585 - protein, 30 aa, Artificial Sequence; identical to SEQ ID NO: 1582
  source: /note="Description of Artificial Sequence: Synthetic polypeptide"
  source: /note="N-term Amino group"
  MOD_RES (1)..(1): CyA
  MOD_RES (6)..(6): 4-MeOh-Phe
  MOD_RES (7)..(7): Nle
  MOD_RES (18)..(18): Pra
  MOD_RES (30)..(30): Cha
  source: /note="C-term Amide"

SEQ ID NO: 1586 - protein, 30 aa, Artificial Sequence; identical to SEQ ID NO: 1582
  source: /note="Description of Artificial Sequence: Synthetic polypeptide"
  source: /note="N-term Amino group"
  MOD_RES (1)..(1): CyA
  MOD_RES (6)..(6): 3-Brh-Phe
  MOD_RES (7)..(7): Nle
  MOD_RES (18)..(18): Pra
  MOD_RES (30)..(30): Cha
  source: /note="C-term Amide"

SEQ ID NO: 1587 - protein, 30 aa, Artificial Sequence; identical to SEQ ID NO: 1582
  source: /note="Description of Artificial Sequence: Synthetic polypeptide"
  source: /note="N-term Amino group"
  MOD_RES (1)..(1): CyA
  MOD_RES (6)..(6): 3-Clh-Phe
  MOD_RES (7)..(7): Nle
  MOD_RES (18)..(18): Pra
  MOD_RES (30)..(30): Cha
  source: /note="C-term Amide"

SEQ ID NO: 1588 - protein, 30 aa, Artificial Sequence; identical to SEQ ID NO: 1582
  source: /note="Description of Artificial Sequence: Synthetic polypeptide"
  source: /note="N-term Amino group"
  MOD_RES (1)..(1): CyA
  MOD_RES (6)..(6): 3-Pheh-Phe
  MOD_RES (7)..(7): Nle
  MOD_RES (18)..(18): Pra
  MOD_RES (30)..(30): Cha
  source: /note="C-term Amide"

SEQ ID NO: 1589 - protein, 30 aa, Artificial Sequence; identical to SEQ ID NO: 1582
  source: /note="Description of Artificial Sequence: Synthetic polypeptide"
  source: /note="N-term Amino group"
  MOD_RES (1)..(1): CyA
  MOD_RES (6)..(6): 3-Meh-Phe
  MOD_RES (7)..(7): Nle
  MOD_RES (18)..(18): Pra
  MOD_RES (30)..(30): Cha
  source: /note="C-term Amide"

SEQ ID NO: 1590 - protein, 30 aa, Artificial Sequence; identical to SEQ ID NO: 1582
  source: /note="Description of Artificial Sequence: Synthetic polypeptide"
  source: /note="N-term Amino group"
  MOD_RES (1)..(1): CyA
  MOD_RES (6)..(6): 3-MeOh-Phe
  MOD_RES (7)..(7): Nle
  MOD_RES (18)..(18): Pra
  MOD_RES (30)..(30): Cha
  source: /note="C-term Amide"

SEQ ID NO: 1591 - protein, 30 aa, Artificial Sequence; identical to SEQ ID NO: 1582
  source: /note="Description of Artificial Sequence: Synthetic polypeptide"
  source: /note="N-term Amino group"
  MOD_RES (1)..(1): CyA
  MOD_RES (6)..(6): 2-Brh-Phe
  MOD_RES (7)..(7): Nle
  MOD_RES (18)..(18): Pra
  MOD_RES (30)..(30): Cha
  source: /note="C-term Amide"

SEQ ID NO: 1592 - protein, 30 aa, Artificial Sequence; identical to SEQ ID NO: 1582
  source: /note="Description of Artificial Sequence: Synthetic polypeptide"
  source: /note="N-term Amino group"
  MOD_RES (1)..(1): CyA
  MOD_RES (6)..(6): 2-Clh-Phe
  MOD_RES (7)..(7): Nle
  MOD_RES (18)..(18): Pra
  MOD_RES (30)..(30): Cha
  source: /note="C-term Amide"

SEQ ID NO: 1593 - protein, 30 aa, Artificial Sequence; identical to SEQ ID NO: 1582
  source: /note="Description of Artificial Sequence: Synthetic polypeptide"
  source: /note="N-term Amino group"
  MOD_RES (1)..(1): CyA
  MOD_RES (6)..(6): 2-Pheh-Phe
  MOD_RES (7)..(7): Nle
  MOD_RES (18)..(18): Pra
  MOD_RES (30)..(30): Cha
  source: /note="C-term Amide"

SEQ ID NO: 1594 - protein, 30 aa, Artificial Sequence; identical to SEQ ID NO: 1582
  source: /note="Description of Artificial Sequence: Synthetic polypeptide"
  source: /note="N-term Amino group"
  MOD_RES (1)..(1): CyA
  MOD_RES (6)..(6): 2-Meh-Phe
  MOD_RES (7)..(7): Nle
  MOD_RES (18)..(18): Pra
  MOD_RES (30)..(30): Cha
  source: /note="C-term Amide"

SEQ ID NO: 1595 - protein, 30 aa, Artificial Sequence; identical to SEQ ID NO: 1582
  source: /note="Description of Artificial Sequence: Synthetic polypeptide"
  source: /note="N-term Amino group"
  MOD_RES (1)..(1): CyA
  MOD_RES (6)..(6): 2-MeOh-Phe
  MOD_RES (7)..(7): Nle
  MOD_RES (18)..(18): Pra
  MOD_RES (30)..(30): Cha
  source: /note="C-term Amide"

SEQ ID NO: 1596 - protein, 30 aa, Artificial Sequence
  source: /note="Description of Artificial Sequence: Synthetic polypeptide"
  source: /note="N-term Amino group"
  MOD_RES (1)..(1): Pra
  MOD_RES (6)..(6): hPhe
  MOD_RES (7)..(7): Nle
  source: /note="C-term Amide"
GECQKFLWTCDSKRECCEGLRCKLWCRKEI

SEQ ID NO: 1597 - protein, 30 aa, Artificial Sequence
  source: /note="Description of Artificial Sequence: Synthetic polypeptide"
  source: /note="N-term Amino group"
  MOD_RES (1)..(1): Pra
  MOD_RES (7)..(7): Nle
  MOD_RES (30)..(30): Cha
  source: /note="C-term Amide"
GECQKWLWTCDSKRECCEGLRCKLWCRKEA

SEQ ID NO: 1598 - protein, 30 aa, Artificial Sequence
  source: /note="Description of Artificial Sequence: Synthetic polypeptide"
  source: /note="N-term Amino group"
  MOD_RES (1)..(1): Pra
  MOD_RES (6)..(6): hPhe
  MOD_RES (7)..(7): Nle
  MOD_RES (30)..(30): Cha
  source: /note="C-term Amide"
GECQKFLWTCDSKRECCEGLRCKLWCRKEA

SEQ ID NO: 1599 - protein, 30 aa, Artificial Sequence
  source: /note="Description of Artificial Sequence: Synthetic polypeptide"
  source: /note="N-term Amino group"
  MOD_RES (2)..(2): Pra
  MOD_RES (6)..(6): hPhe
  MOD_RES (7)..(7): Nle
  source: /note="C-term Amide"
EGCQKFLWTCDEKRACCEGLRCKLWCRKEI

SEQ ID NO: 1600 - protein, 30 aa, Artificial Sequence
  source: /note="Description of Artificial Sequence: Synthetic polypeptide"
  source: /note="N-term Amino group"
  MOD_RES (2)..(2): Pra
  MOD_RES (6)..(6): hPhe
  MOD_RES (7)..(7): Nle
  source: /note="C-term Amide"
EGCQKFLWTCDSKRECCEGLRCKLWCRKEI

SEQ ID NO: 1601 - protein, 30 aa, Artificial Sequence
  source: /note="Description of Artificial Sequence: Synthetic polypeptide"
  source: /note="N-term Amino group"
  MOD_RES (2)..(2): Pra
  MOD_RES (6)..(6): hPhe
  MOD_RES (7)..(7): Nle
  MOD_RES (30)..(30): Cha
  source: /note="C-term Amide"
EGCQKFLWTCDEKRACCEGLRCKLWCRKEA

SEQ ID NO: 1602 - protein, 30 aa, Artificial Sequence
  source: /note="Description of Artificial Sequence: Synthetic polypeptide"
  source: /note="N-term Amino group"
  MOD_RES (2)..(2): Pra
  MOD_RES (6)..(6): hPhe
  MOD_RES (7)..(7): Nle
  MOD_RES (30)..(30): Cha
  source: /note="C-term Amide"
EGCQKFLWTCDSKRECCEGLRCKLWCRKEA

SEQ ID NO: 1603 - protein, 30 aa, Artificial Sequence; identical to SEQ ID NO: 843
  source: /note="Description of Artificial Sequence: Synthetic polypeptide"
  source: /note="N-term Amino group"
  MOD_RES (1)..(1): Pra
  MOD_RES (6)..(6): 4-Brh-Phe
  MOD_RES (7)..(7): Nle
  source: /note="C-term Amide"

SEQ ID NO: 1604 - protein, 30 aa, Artificial Sequence; identical to SEQ ID NO: 878
  source: /note="Description of Artificial Sequence: Synthetic polypeptide"
  source: /note="N-term Amino group"
  MOD_RES (1)..(1): Pra
  MOD_RES (6)..(6): 4-Brh-Phe
  MOD_RES (7)..(7): Nle
  MOD_RES (30)..(30): Cha
  source: /note="C-term Amide"

SEQ ID NO: 1605 - protein, 30 aa, Artificial Sequence; identical to SEQ ID NO: 864
  source: /note="Description of Artificial Sequence: Synthetic polypeptide"
  source: /note="N-term Amino group"
  MOD_RES (1)..(1): CyA
  MOD_RES (6)..(6): 4-Brh-Phe
  MOD_RES (7)..(7): Nle
  MOD_RES (18)..(18): Pra
  source: /note="C-term Amide"

SEQ ID NO: 1606 - protein, 30 aa, Artificial Sequence; identical to SEQ ID NO: 1582
  source: /note="Description of Artificial Sequence: Synthetic polypeptide"
  source: /note="N-term Amino group"
  MOD_RES (1)..(1): CyA
  MOD_RES (6)..(6): 4-Brh-Phe
  MOD_RES (7)..(7): Nle
  MOD_RES (18)..(18): Pra
  MOD_RES (30)..(30): Cha
  source: /note="C-term Amide"

SEQ ID NO: 1607 - protein, 30 aa, Artificial Sequence
  source: /note="Description of Artificial Sequence: Synthetic polypeptide"
  source: /note="N-term Amino group"
  MOD_RES (1)..(1): CyA
  MOD_RES (7)..(7): Nle
  MOD_RES (18)..(18): Pra
  MOD_RES (25)..(25): 4tBu-Phe
  source: /note="C-term Amide"
AYCQKWLWTCDSKRACCGGLRCKLFCRKEI

SEQ ID NO: 1608 - protein, 30 aa, Artificial Sequence; identical to SEQ ID NO: 853
  source: /note="Description of Artificial Sequence: Synthetic polypeptide"
  source: /note="N-term Amino group"
  MOD_RES (1)..(1): Pra
  MOD_RES (7)..(7): Nle
  MOD_RES (25)..(25): 4tBu-Phe
  source: /note="C-term Amide"

SEQ ID NO: 1609 - protein, 30 aa, Artificial Sequence; identical to SEQ ID NO: 328
  source: /note="Description of Artificial Sequence: Synthetic polypeptide"
  source: /note="N-term Amino group"
  MOD_RES (1)..(1): Pra
  MOD_RES (7)..(7): Nle
  MOD_RES (25)..(25): 6-Br-Trp
  source: /note="C-term Amide"

SEQ ID NO: 1610 - protein, 30 aa, Artificial Sequence; identical to SEQ ID NO: 328
  source: /note="Description of Artificial Sequence: Synthetic polypeptide"
  source: /note="N-term Amino group"
  MOD_RES (1)..(1): Pra
  MOD_RES (7)..(7): Nle
  MOD_RES (25)..(25): 6-Me-Trp
  source: /note="C-term Amide"

SEQ ID NO: 1611 - protein, 30 aa, Artificial Sequence; identical to SEQ ID NO: 328
  source: /note="Description of Artificial Sequence: Synthetic polypeptide"
  source: /note="N-term Amino group"
  MOD_RES (1)..(1): Pra
  MOD_RES (7)..(7): Nle
  MOD_RES (25)..(25): 7-Br-Trp
  source: /note="C-term Amide"

SEQ ID NO: 1612 - protein, 30 aa, Artificial Sequence
  source: /note="Description of Artificial Sequence: Synthetic polypeptide"
  source: /note="N-term Amino group"
  MOD_RES (1)..(1): Pra
  MOD_RES (7)..(7): Nle
  source: /note="C-term Amide"
GYCQKWLWTCDSKRACCEGLRCKLWCRKIF

SEQ ID NO: 1613 - protein, 30 aa, Artificial Sequence; identical to SEQ ID NO: 1612
  source: /note="Description of Artificial Sequence: Synthetic polypeptide"
  source: /note="N-term Amino group"
  MOD_RES (1)..(1): Pra
  MOD_RES (7)..(7): Nle
  MOD_RES (30)..(30): hPhe
  source: /note="C-term Amide"

SEQ ID NO: 1614 - protein, 30 aa, Artificial Sequence; identical to SEQ ID NO: 1612
  source: /note="Description of Artificial Sequence: Synthetic polypeptide"
  source: /note="N-term Amino group"
  MOD_RES (1)..(1): Pra
  MOD_RES (7)..(7): Nle
  MOD_RES (30)..(30): 4-Me-Phe
  source: /note="C-term Amide"

SEQ ID NO: 1615 - protein, 30 aa, Artificial Sequence; identical to SEQ ID NO: 876
  source: /note="Description of Artificial Sequence: Synthetic polypeptide"
  source: /note="N-term Amino group"
  MOD_RES (1)..(1): CyA
  MOD_RES (7)..(7): Nle
  MOD_RES (18)..(18): Pra
  MOD_RES (30)..(30): 4-Me-Phe
  source: /note="C-term Amide"

SEQ ID NO: 1616 - protein, 30 aa, Artificial Sequence
  source: /note="Description of Artificial Sequence: Synthetic polypeptide"
  source: /note="N-term Amino group"
  MOD_RES (1)..(1): CyA
  MOD_RES (7)..(7): Nle
  MOD_RES (18)..(18): Pra
  MOD_RES (21)..(21): Cit
  MOD_RES (25)..(25): 5-Br-Trp
  source: /note="C-term Amide"
AYCQKWLWTCDSKRACCGGLXCKLWCRKEI

SEQ ID NO: 1617 - protein, 31 aa, Artificial Sequence
  source: /note="Description of Artificial Sequence: Synthetic polypeptide"
  source: /note="N-term Amino group"
  MOD_RES (1)..(1): CyA
  MOD_RES (7)..(7): Nle
  MOD_RES (18)..(18): Pra
  MOD_RES (21)..(21): Cit
  MOD_RES (25)..(25): 5-Br-Trp
  MOD_RES (27)..(27): Cit
  source: /note="C-term FreeAcid"
AYCQKWLWTCDSKRACCGGLXCKLWCXKEIG

SEQ ID NO: 1618 - protein, 31 aa, Artificial Sequence
  source: /note="Description of Artificial Sequence: Synthetic polypeptide"
  source: /note="N-term Amino group"
  MOD_RES (7)..(7): Nle
  MOD_RES (18)..(18): Pra
  MOD_RES (27)..(27): Cit
  source: /note="C-term FreeAcid"
EYCQKWLWTCDSKRACCGGLRCKLWCXKEIG

SEQ ID NO: 1619 - protein, 31 aa, Artificial Sequence
  source: /note="Description of Artificial Sequence: Synthetic polypeptide"
  source: /note="N-term Amino group"
  MOD_RES (2)..(2): Nva
  MOD_RES (8)..(8): Nle
  MOD_RES (19)..(19): Pra
  MOD_RES (26)..(26): 5-Br-Trp
  source: /note="C-term Amide"
EVYCQKWLWTCDSKRACCGGLRCKLWCRKEI

SEQ ID NO: 1620 - protein, 31 aa, Artificial Sequence
  source: /note="Description of Artificial Sequence: Synthetic polypeptide"
  source: /note="N-term Amino group"
  MOD_RES (2)..(2): Nva
  MOD_RES (8)..(8): Nle
  MOD_RES (13)..(13): Pra
  source: /note="C-term Amide"
EVYCQKWLWTCDGKRACCEGLRCKLWCRKEI

SEQ ID NO: 1621 - protein, 31 aa, Artificial Sequence; identical to SEQ ID NO: 1620
  source: /note="Description of Artificial Sequence: Synthetic polypeptide"
  source: /note="N-term Amino group"
  MOD_RES (2)..(2): Nva
  MOD_RES (8)..(8): Nle
  MOD_RES (13)..(13): Pra
  MOD_RES (26)..(26): 5-Br-Trp
  source: /note="C-term Amide"

SEQ ID NO: 1622 - protein, 31 aa, Artificial Sequence
  source: /note="Description of Artificial Sequence: Synthetic polypeptide"
  source: /note="N-term Amino group"
  MOD_RES (2)..(2): Nva
  MOD_RES (8)..(8): Nle
  MOD_RES (13)..(13): Pra
  MOD_RES (26)..(26): 5-Br-Trp
  source: /note="C-term Amide"
EVYCQKWLWTCDGKRACCEGLRCKLWCRKEW

SEQ ID NO: 1623 - protein, 31 aa, Artificial Sequence
  source: /note="Description of Artificial Sequence: Synthetic polypeptide"
  source: /note="N-term Amino group"
  MOD_RES (2)..(2): Nva
  MOD_RES (8)..(8): Nle
  MOD_RES (13)..(13): Pra
  MOD_RES (26)..(26): 5-Br-Trp
  MOD_RES (31)..(31): 4tBu-Phe
  source: /note="C-term Amide"
EVYCQKWLWTCDGKRACCEGLRCKLWCRKEF

SEQ ID NO: 1624 - protein, 30 aa, Artificial Sequence; identical to SEQ ID NO: 520
  source: /note="Description of Artificial Sequence: Synthetic polypeptide"
  source: /note="N-term Amino group"
  MOD_RES (1)..(1): CyA
  MOD_RES (7)..(7): Nle
  MOD_RES (12)..(12): Pra
  MOD_RES (25)..(25): 5-Br-Trp
  source: /note="C-term Amide"

SEQ ID NO: 1625 - protein, 30 aa, Artificial Sequence
  source: /note="Description of Artificial Sequence: Synthetic polypeptide"
  source: /note="N-term Amino group"
  MOD_RES (1)..(1): CyA
  MOD_RES (7)..(7): Nle
  MOD_RES (12)..(12): Pra
  MOD_RES (25)..(25): 4tBu-Phe
  source: /note="C-term Amide"
AYCQKWLWTCDGKRACCEGLRCKLFCRKEI

SEQ ID NO: 1626 - protein, 30 aa, Artificial Sequence
  source: /note="Description of Artificial Sequence: Synthetic polypeptide"
  source: /note="N-term Amino group"
  MOD_RES (1)..(1): CyA
  MOD_RES (7)..(7): Nle
  MOD_RES (12)..(12): Pra
  MOD_RES (25)..(25): 5-Br-Trp
  source: /note="C-term Amide"
AYCQKWLWTCDGERACCEGLRCKLWCRKII

SEQ ID NO: 1627 - protein, 30 aa, Artificial Sequence
  source: /note="Description of Artificial Sequence: Synthetic polypeptide"
  source: /note="N-term Amino group"
  MOD_RES (1)..(1): Nva
  MOD_RES (7)..(7): Nle
  MOD_RES (12)..(12): Pra
  source: /note="C-term Amide"
VYCQKWLWTCDGKRACCEGLRCKLWCRKEI

SEQ ID NO: 1628 - protein, 30 aa, Artificial Sequence
  source: /note="Description of Artificial Sequence: Synthetic polypeptide"
  source: /note="N-term Amino group"
  MOD_RES (1)..(1): Nva
  MOD_RES (7)..(7): Nle
  MOD_RES (12)..(12): Pra
  source: /note="C-term Amide"
VYCQKWLWTCDGERACCEGLRCKLWCRKEI

SEQ ID NO: 1629 - protein, 30 aa, Artificial Sequence
  source: /note="Description of Artificial Sequence: Synthetic polypeptide"
  source: /note="N-term Amino group"
  MOD_RES (1)..(1): CyA
  MOD_RES (7)..(7): Nle
  MOD_RES (12)..(12): Pra
  MOD_RES (25)..(25): 5-Br-Trp
  source: /note="C-term Amide"
AYCQKWLWTCDGERACCEGLRCKLWCRKEI

SEQ ID NO: 1630 - protein, 31 aa, Artificial Sequence
  source: /note="Description of Artificial Sequence: Synthetic polypeptide"
  source: /note="N-term Amino group"
  MOD_RES (1)..(1): CyA
  MOD_RES (7)..(7): Nle
  MOD_RES (18)..(18): Pra
  MOD_RES (25)..(25): 5-Br-Trp
  source: /note="C-term FreeAcid"
AYCQKWLWTCDSKRACCGGLRCKLWCRKEIG

SEQ ID NO: 1631 - protein, 32 aa, Artificial Sequence
  source: /note="Description of Artificial Sequence: Synthetic polypeptide"
  source: /note="N-term Amino group"
  MOD_RES (1)..(1): CyA
  MOD_RES (7)..(7): Nle
  MOD_RES (18)..(18): Pra
  MOD_RES (25)..(25): 5-Br-Trp
  source: /note="C-term FreeAcid"
AYCQKWLWTCDSKRACCGGLRCKLWCRKEIGE

SEQ ID NO: 1632 - protein, 30 aa, Artificial Sequence; identical to SEQ ID NO: 1616
  source: /note="Description of Artificial Sequence: Synthetic polypeptide"
  source: /note="N-term Amino group"
  MOD_RES (1)..(1): CyA
  MOD_RES (7)..(7): Nle
  MOD_RES (18)..(18): Pra
  MOD_RES (21)..(21): Cit
  source: /note="C-term Amide"

SEQ ID NO: 1633 - protein, 30 aa, Artificial Sequence
  source: /note="Description of Artificial Sequence: Synthetic polypeptide"
  source: /note="N-term Amino group"
  MOD_RES (1)..(1): CyA
  MOD_RES (7)..(7): Nle
  MOD_RES (18)..(18): Pra
  MOD_RES (21)..(21): Cit
  MOD_RES (27)..(27): Cit
  source: /note="C-term Amide"
AYCQKWLWTCDSKRACCGGLXCKLWCXKEI

SEQ ID NO: 1634 - protein, 30 aa, Artificial Sequence
  source: /note="Description of Artificial Sequence: Synthetic polypeptide"
  source: /note="N-term Amino group"
  MOD_RES (1)..(1): CyA
  MOD_RES (7)..(7): Nle
  MOD_RES (18)..(18): Pra
  MOD_RES (25)..(25): 5-Br-Trp
  MOD_RES (27)..(27): Cit
  source: /note="C-term Amide"
AYCQKWLWTCDSKRACCGGLRCKLWCXKEI

SEQ ID NO: 1635 - protein, 32 aa, Artificial Sequence
  source: /note="Description of Artificial Sequence: Synthetic polypeptide"
  source: /note="N-term Amino group"
  MOD_RES (1)..(1): Pra
  MOD_RES (7)..(7): Nle
  MOD_RES (25)..(25): 5-Br-Trp
  source: /note="C-term FreeAcid"
GYCQKWLWTCDSKRACCEGLRCKLWCRKEFGE

SEQ ID NO: 1636 - protein, 30 aa, Artificial Sequence
  source: /note="Description of Artificial Sequence: Synthetic polypeptide"
  source: /note="N-term Amino group"
  MOD_RES (1)..(1): Nva
  MOD_RES (6)..(6): hPhe
  MOD_RES (7)..(7): Nle
  MOD_RES (18)..(18): Pra
  MOD_RES (25)..(25): 5-Br-Trp
  source: /note="C-term Amide"
VYCQKFLWTCDEKRACCGGLRCKLWCRKEI

SEQ ID NO: 1637 - protein, 30 aa, Artificial Sequence
  source: /note="Description of Artificial Sequence: Synthetic polypeptide"
  source: /note="N-term Amino group"
  MOD_RES (1)..(1): Nva
  MOD_RES (6)..(6): hPhe
  MOD_RES (7)..(7): Nle
  MOD_RES (18)..(18): Pra
  MOD_RES (25)..(25): 5-Br-Trp
  source: /note="C-term Amide"
VYCQKFLWTCDSKRACCGGLRCKLWCRKEI

SEQ ID NO: 1638 - protein, 30 aa, Artificial Sequence
  source: /note="Description of Artificial Sequence: Synthetic polypeptide"
  source: /note="N-term Amino group"
  MOD_RES (1)..(1): Nva
  MOD_RES (6)..(6): hPhe
  MOD_RES (7)..(7): Nle
  MOD_RES (12)..(12): Pra
  MOD_RES (25)..(25): 5-Br-Trp
  source: /note="C-term Amide"
VYCQKFLWTCDGKRACCEGLRCKLWCRKEI

SEQ ID NO: 1639 - protein, 30 aa, Artificial Sequence; identical to SEQ ID NO: 1638
  source: /note="Description of Artificial Sequence: Synthetic polypeptide"
  source: /note="N-term Amino group"
  MOD_RES (1)..(1): Nva
  MOD_RES (6)..(6): 4-Cl-Phe
  MOD_RES (7)..(7): Nle
  MOD_RES (12)..(12): Pra
  MOD_RES (25)..(25): 5-Br-Trp
  source: /note="C-term Amide"

SEQ ID NO: 1640 - protein, 30 aa, Artificial Sequence; identical to SEQ ID NO: 1638
  source: /note="Description of Artificial Sequence: Synthetic polypeptide"
  source: /note="N-term Amino group"
  MOD_RES (1)..(1): Nva
  MOD_RES (6)..(6): 4-Cl-Phe
  MOD_RES (7)..(7): Nle
  MOD_RES (12)..(12): Pra
  source: /note="C-term Amide"

SEQ ID NO: 1641 - protein, 30 aa, Artificial Sequence
  source: /note="Description of Artificial Sequence: Synthetic polypeptide"
  source: /note="N-term Amino group"
  MOD_RES (1)..(1): CyA
  MOD_RES (6)..(6): hPhe
  MOD_RES (7)..(7): Nle
  MOD_RES (18)..(18): Pra
  source: /note="C-term Amide"
AYCQKFLWTCDSKRACCGGLRCKLWCREEI

SEQ ID NO: 1642 - protein, 30 aa, Artificial Sequence
  source: /note="Description of Artificial Sequence: Synthetic polypeptide"
  source: /note="N-term Amino group"
  MOD_RES (1)..(1): Pra
  MOD_RES (7)..(7): Nle
  source: /note="C-term Amide"
GYCQKWLWTCDSERACCEGLRCKLWCRQII

SEQ ID NO: 1643 - protein, 30 aa, Artificial Sequence
  source: /note="Description of Artificial Sequence: Synthetic polypeptide"
  source: /note="N-term Amino group"
  MOD_RES (2)..(2): Nva
  MOD_RES (7)..(7): Nle
  MOD_RES (12)..(12): Pra
  MOD_RES (25)..(25): 5-Br-Trp
  source: /note="C-term Amide"
EVCQKWLWTCDGKRACCEGLRCKLWCREEI

SEQ ID NO: 1644 - protein, 31 aa, Artificial Sequence
  source: /note="Description of Artificial Sequence: Synthetic polypeptide"
  source: /note="N-term Amino group"
  MOD_RES (1)..(1): Pra
  MOD_RES (7)..(7): Nle
  source: /note="C-term FreeAcid"
GYCQKWLWTCDSKRACCEGLRCKLWCRKEFG

SEQ ID NO: 1645 - protein, 30 aa, Artificial Sequence
  source: /note="Description of Artificial Sequence: Synthetic polypeptide"
  source: /note="N-term Amino group"
  MOD_RES (1)..(1): Nva
  MOD_RES (6)..(6): hPhe
  MOD_RES (7)..(7): Nle
  MOD_RES (18)..(18): Pra
  source: /note="C-term Amide"
VYCQKFLWTCDSKRECCGGLRCKLWCRKEI

SEQ ID NO: 1646 - protein, 31 aa, Artificial Sequence
  source: /note="Description of Artificial Sequence: Synthetic polypeptide"
  source: /note="N-term Amino group"
  MOD_RES (2)..(2): Nva
  MOD_RES (7)..(7): Nle
  MOD_RES (18)..(18): Pra
  source: /note="C-term FreeAcid"
EVCQKWLWTCDSKRACCGGLRCKLWCREIIG

SEQ ID NO: 1647 - protein, 31 aa, Artificial Sequence
  source: /note="Description of Artificial Sequence: Synthetic polypeptide"
  source: /note="N-term Amino group"
  MOD_RES (2)..(2): Nva
  MOD_RES (7)..(7): Nle
  MOD_RES (18)..(18): Pra
  source: /note="C-term FreeAcid"
EVCQKWLWTCDSKRACCGGLRCKLWCRQEIG

SEQ ID NO: 1648 - protein, 30 aa, Artificial Sequence
  source: /note="Description of Artificial Sequence: Synthetic polypeptide"
  source: /note="N-term Amino group"
  MOD_RES (1)..(1): CyA
  MOD_RES (7)..(7): Nle
  MOD_RES (18)..(18): Pra
  source: /note="C-term Amide"
AYCQKWLWTCDSERACCGGLRCKLWCRQII

SEQ ID NO: 1649 - protein, 30 aa, Artificial Sequence
  source: /note="Description of Artificial Sequence: Synthetic polypeptide"
  source: /note="N-term Amino group"
  MOD_RES (1)..(1): Pra
  MOD_RES (6)..(6): hPhe
  MOD_RES (7)..(7): Nle
  MOD_RES (25)..(25): 5-Br-Trp
  source: /note="C-term Amide"
GYCQKFLWTCDSKRACCEGLRCKLWCRKEF

SEQ ID NO: 1650 - protein, 30 aa, Artificial Sequence
  source: /note="Description of Artificial Sequence: Synthetic polypeptide"
  source: /note="N-term Amino group"
  MOD_RES (1)..(1): CyA
  MOD_RES (6)..(6): hPhe
  MOD_RES (7)..(7): Nle
  MOD_RES (12)..(12): Pra
  MOD_RES (25)..(25): 5-Br-Trp
  source: /note="C-term Amide"
AYCQKFLWTCDGKRACCEGLRCKLWCRKEF

SEQ ID NO: 1651 - protein, 30 aa, Artificial Sequence
  source: /note="Description of Artificial Sequence: Synthetic polypeptide"
  source: /note="N-term Amino group"
  MOD_RES (6)..(6): hPhe
  MOD_RES (7)..(7): Nle
  MOD_RES (18)..(18): Pra
  MOD_RES (25)..(25): 5-Br-Trp
  source: /note="C-term Amide"
EYCQKFLWTCDSKRACCGGLRCKLWCRKEF

SEQ ID NO: 1652 - protein, 30 aa, Artificial Sequence
  source: /note="Description of Artificial Sequence: Synthetic polypeptide"
  source: /note="N-term Amino group"
  MOD_RES (1)..(1): CyA
  MOD_RES (7)..(7): Nle
  MOD_RES (18)..(18): Pra
  MOD_RES (24)..(24): Chg
  MOD_RES (25)..(25): 5-Br-Trp
  source: /note="C-term Amide"
AYCQKWLWTCDSKRACCGGLRCKGWCRKEI

SEQ ID NO: 1653 - protein, 30 aa, Artificial Sequence
  source: /note="Description of Artificial Sequence: Synthetic polypeptide"
  source: /note="N-term Amino group"
  MOD_RES (6)..(6): hPhe
  MOD_RES (7)..(7): Nle
  MOD_RES (12)..(12): Pra
  MOD_RES (24)..(24): Chg
  source: /note="C-term Amide"
EYCQKFLWTCDGKRACCEGLRCKGWCRKEF

SEQ ID NO: 1654 - protein, 31 aa, Artificial Sequence
  source: /note="Description of Artificial Sequence: Synthetic polypeptide"
  source: /note="N-term Amino group"
  MOD_RES (1)..(1): Pra
  MOD_RES (7)..(7): Nle
  MOD_RES (24)..(24): Chg
  source: /note="C-term FreeAcid"
GYCQKWLWTCDEKRACCEGLRCKGWCRKEFG

SEQ ID NO: 1655 - protein, 30 aa, Artificial Sequence
  source: /note="Description of Artificial Sequence: Synthetic polypeptide"
  source: /note="N-term Amino group"
  MOD_RES (1)..(1): Pra
  MOD_RES (7)..(7): Nle
  MOD_RES (21)..(21): Cit
  MOD_RES (24)..(24): Chg
  source: /note="C-term Amide"
GYCQKWLWTCDSKRACCEGLXCKGWCRKEI

SEQ ID NO: 1656 - protein, 30 aa, Artificial Sequence
  source: /note="Description of Artificial Sequence: Synthetic polypeptide"
  source: /note="N-term Amino group"
  MOD_RES (7)..(7): Nle
  MOD_RES (18)..(18): Pra
  MOD_RES (21)..(21): Cit
  MOD_RES (24)..(24): Chg
  source: /note="C-term Amide"
EYCQKWLWTCDSKRACCGGLXCKGWCRKEI

SEQ ID NO: 1657 - protein, 30 aa, Artificial Sequence
  source: /note="Description of Artificial Sequence: Synthetic polypeptide"
  source: /note="N-term Amino group"
  MOD_RES (1)..(1): CyA
  MOD_RES (7)..(7): Nle
  MOD_RES (12)..(12): Pra
  MOD_RES (24)..(24): Chg
  MOD_RES (25)..(25): 5-Br-Trp
  source: /note="C-term Amide"
AECQKWLWTCDGKRACCEGLRCKGWCRKEI

SEQ ID NO: 1658 - protein, 30 aa, Artificial Sequence; identical to SEQ ID NO: 768
  source: /note="Description of Artificial Sequence: Synthetic polypeptide"
  source: /note="N-term Amino group"
  MOD_RES (1)..(1): CyA
  MOD_RES (7)..(7): Nle
  MOD_RES (18)..(18): Pra
  MOD_RES (25)..(25): 5-Br-Trp
  source: /note="C-term Amide"

SEQ ID NO: 1659 - protein, 30 aa, Artificial Sequence
  source: /note="Description of Artificial Sequence: Synthetic polypeptide"
  source: /note="N-term Amino group"
  MOD_RES (1)..(1): Nva
  MOD_RES (6)..(6): hPhe
  MOD_RES (7)..(7): Nle
  MOD_RES (18)..(18): Pra
  MOD_RES (21)..(21): Cit
  MOD_RES (24)..(24): Chg
  MOD_RES (25)..(25): 5-Br-Trp
  source: /note="C-term Amide"
VYCQKFLWTCDEKRACCGGLXCKGWCRKEF

SEQ ID NO: 1660 - protein, 30 aa, Artificial Sequence
  source: /note="Description of Artificial Sequence: Synthetic polypeptide"
  source: /note="N-term Amino group"
  MOD_RES (1)..(1): Pra
  MOD_RES (6)..(6): hPhe
  MOD_RES (7)..(7): Nle
  MOD_RES (21)..(21): Cit
  MOD_RES (24)..(24): Chg
  MOD_RES (25)..(25): 5-Br-Trp
  source: /note="C-term Amide"
GYCQKFLWTCDEKRACCEGLXCKGWCRKEF

SEQ ID NO: 1661 - protein, 30 aa, Artificial Sequence
  source: /note="Description of Artificial Sequence: Synthetic polypeptide"
  source: /note="N-term Amino group"
  MOD_RES (1)..(1): Nva
  MOD_RES (6)..(6): hPhe
  MOD_RES (7)..(7): Nle
  MOD_RES (18)..(18): Pra
  MOD_RES (25)..(25): 5-Br-Trp
  source: /note="C-term Amide"
VYCQKFLWTCDSKRECCGGLRCKLWCRKIF

SEQ ID NO: 1662 - protein, 30 aa, Artificial Sequence; identical to SEQ ID NO: 395
  source: /note="Description of Artificial Sequence: Synthetic polypeptide"
  source: /note="N-term Amino group"
  MOD_RES (1)..(1): CyA
  MOD_RES (7)..(7): Nle
  MOD_RES (18)..(18): Pra
  MOD_RES (25)..(25): 5-Me-Trp
  source: /note="C-term Amide"

SEQ ID NO: 1663 - protein, 30 aa, Artificial Sequence; identical to SEQ ID NO: 328
  source: /note="Description of Artificial Sequence: Synthetic polypeptide"
  source: /note="N-term Amino group"
  MOD_RES (1)..(1): Pra
  MOD_RES (7)..(7): Nle
  MOD_RES (25)..(25): 5-Me-Trp
  source: /note="C-term Amide"

SEQ ID NO: 1664 - protein, 29 aa, Artificial Sequence
  source: /note="Description of Artificial Sequence: Synthetic peptide"
  source: /note="N-term Amino group"
  MOD_RES (6)..(6): Nle
  MOD_RES (11)..(11): Pra
  MOD_RES (24)..(24): 5-Me-Trp
  source: /note="C-term Amide"
YCQKWLWTCDGKRACCEGLRCKLWCRKEI

SEQ ID NO: 1665 - protein, 30 aa, Artificial Sequence; identical to SEQ ID NO: 1607
  source: /note="Description of Artificial Sequence: Synthetic polypeptide"
  source: /note="N-term Amino group"
  MOD_RES (1)..(1): CyA
  MOD_RES (7)..(7): Nle
  MOD_RES (18)..(18): Pra
  MOD_RES (25)..(25): DiCl-Phe
  source: /note="C-term Amide"

SEQ ID NO: 1666 - protein, 30 aa, Artificial Sequence; identical to SEQ ID NO: 853
  source: /note="Description of Artificial Sequence: Synthetic polypeptide"
  source: /note="N-term Amino group"
  MOD_RES (1)..(1): Pra
  MOD_RES (7)..(7): Nle
  MOD_RES (25)..(25): DiCl-Phe
  source: /note="C-term Amide"

SEQ ID NO: 1667 - protein, 30 aa, Artificial Sequence
  source: /note="Description of Artificial Sequence: Synthetic polypeptide"
  source: /note="N-term Amino group"
  MOD_RES (1)..(1): CyA
  MOD_RES (7)..(7): Nle
  MOD_RES (18)..(18): Pra
  source: /note="C-term Amide"
AYCQKWLWTADSKRACCGGLRAKLWCRKEI

SEQ ID NO: 1668 - protein, 30 aa, Artificial Sequence; identical to SEQ ID NO: 328
  source: /note="Description of Artificial Sequence: Synthetic polypeptide"
  source: /note="N-term Amino group"
  MOD_RES (1)..(1): Pra
  MOD_RES (7)..(7): Nle
  MOD_RES (25)..(25): 5-Cl-Trp
  source: /note="C-term Amide"

SEQ ID NO: 1669 - protein, 30 aa, Artificial Sequence; identical to SEQ ID NO: 853
  source: /note="Description of Artificial Sequence: Synthetic polypeptide"
  source: /note="N-term Amino group"
  MOD_RES (1)..(1): Pra
  MOD_RES (7)..(7): Nle
  MOD_RES (25)..(25): pI-Phe
  source: /note="C-term Amide"

SEQ ID NO: 1670 - protein, 30 aa, Artificial Sequence; identical to SEQ ID NO: 395
  source: /note="Description of Artificial Sequence: Synthetic polypeptide"
  source: /note="N-term Amino group"
  MOD_RES (1)..(1): CyA
  MOD_RES (7)..(7): Nle
  MOD_RES (18)..(18): Pra
  MOD_RES (25)..(25): 5-Cl-Trp
  source: /note="C-term Amide"

SEQ ID NO: 1671 - protein, 30 aa, Artificial Sequence; identical to SEQ ID NO: 1607
  source: /note="Description of Artificial Sequence: Synthetic polypeptide"
  source: /note="N-term Amino group"
  MOD_RES (1)..(1): CyA
  MOD_RES (7)..(7): Nle
  MOD_RES (18)..(18): Pra
  MOD_RES (25)..(25): pI-Phe
  source: /note="C-term Amide"

SEQ ID NO: 1672 - protein, 29 aa, Artificial Sequence
  source: /note="Description of Artificial Sequence: Synthetic peptide"
  source: /note="N-term Amino group"
  MOD_RES (1)..(1): CyA
  MOD_RES (6)..(6): Nle
  MOD_RES (17)..(17): Pra
  source: /note="C-term Amide"
ACQKWLWTCDEKRACCGGLRCKLWCRKEI

SEQ ID NO: 1673 - protein, 29 aa, Artificial Sequence
  source: /note="Description of Artificial Sequence: Synthetic peptide"
  source: /note="N-term Amino group"
  MOD_RES (1)..(1): CyA
  MOD_RES (6)..(6): Nle
  MOD_RES (17)..(17): Pra
  source: /note="C-term Amide"
ACQKWLWTCDEERACCGGLRCKLWCRKEI

SEQ ID NO: 1674 - protein, 29 aa, Artificial Sequence
  source: /note="Description of Artificial Sequence: Synthetic peptide"
  source: /note="N-term Amino group"
  MOD_RES (1)..(1): CyA
  MOD_RES (6)..(6): Nle
  MOD_RES (17)..(17): Pra
  source: /note="C-term Amide"
ACQKWLWTCDEERACCGGLVCKLWCRKEI

SEQ ID NO: 1675 - protein, 29 aa, Artificial Sequence
  source: /note="Description of Artificial Sequence: Synthetic peptide"
  source: /note="N-term Amino group"
  MOD_RES (1)..(1): CyA
  MOD_RES (6)..(6): Nle
  MOD_RES (17)..(17): Pra
  source: /note="C-term Amide"
ACQKWLWTCDSARACCGGLRCKLWCRKEI

SEQ ID NO: 1676 - protein, 29 aa, Artificial Sequence
  source: /note="Description of Artificial Sequence: Synthetic peptide"
  source: /note="N-term Amino group"
  MOD_RES (1)..(1): CyA
  MOD_RES (6)..(6): Nle
  MOD_RES (17)..(17): Pra
  source: /note="C-term Amide"
ACQKWLWTCDSKRACCGDLRCKLWCRKEI

SEQ ID NO: 1677 - protein, 29 aa, Artificial Sequence
  source: /note="Description of Artificial Sequence: Synthetic peptide"
  source: /note="N-term Amino group"
  MOD_RES (1)..(1): CyA
  MOD_RES (6)..(6): Nle
  MOD_RES (17)..(17): Pra
  source: /note="C-term Amide"
ACQKWLWTCDSERACCGDLRCKLWCRKEI

SEQ ID NO: 1678 - protein, 29 aa, Artificial Sequence
  source: /note="Description of Artificial Sequence: Synthetic peptide"
  source: /note="N-term Amino group"
  MOD_RES (1)..(1): CyA
  MOD_RES (6)..(6): Nle
  MOD_RES (17)..(17): Pra
  source: /note="C-term Amide"
ACQKWLWTCDSERACCGDLVCKLWCRKEI

SEQ ID NO: 1679 - protein, 29 aa, Artificial Sequence
  source: /note="Description of Artificial Sequence: Synthetic peptide"
  source: /note="N-term Amino group"
  MOD_RES (1)..(1): CyA
  MOD_RES (6)..(6): Nle
  MOD_RES (17)..(17): Pra
  source: /note="C-term Amide"
ACQKWLWTCDSKRACCGGLVCKLWCRKEI

SEQ ID NO: 1680 - protein, 29 aa, Artificial Sequence
  source: /note="Description of Artificial Sequence: Synthetic peptide"
  source: /note="N-term Amino group"
  MOD_RES (1)..(1): CyA
  MOD_RES (6)..(6): Nle
  MOD_RES (17)..(17): Pra
  source: /note="C-term Amide"
ACQKWLWTCDSKRACCGGLRCQLWCRKEI

SEQ ID NO: 1681 - protein, 29 aa, Artificial Sequence
  source: /note="Description of Artificial Sequence: Synthetic peptide"
  source: /note="N-term Amino group"
  MOD_RES (1)..(1): CyA
  MOD_RES (6)..(6): Nle
  MOD_RES (17)..(17): Pra
  source: /note="C-term Amide"
ACQKWLWTCDSKRACCGGLRCKLWCRYEI

SEQ ID NO: 1682 - protein, 29 aa, Artificial Sequence
  source: /note="Description of Artificial Sequence: Synthetic peptide"
  source: /note="N-term Amino group"
  MOD_RES (1)..(1): CyA
  MOD_RES (6)..(6): Nle
  MOD_RES (17)..(17): Pra
  source: /note="C-term Amide"
ACQKWLWTCDSKRACCGGLRCKLWCRLEI

SEQ ID NO: 1683 - protein, 29 aa, Artificial Sequence
  source: /note="Description of Artificial Sequence: Synthetic peptide"
  source: /note="N-term Amino group"
  MOD_RES (1)..(1): Pra
  MOD_RES (6)..(6): Nle
  source: /note="C-term Amide"
GCQKWLWTCDEERACCEGLVCKLWCRKEI

SEQ ID NO: 1684 - protein, 29 aa, Artificial Sequence
  source: /note="Description of Artificial Sequence: Synthetic peptide"
  source: /note="N-term Amino group"
  MOD_RES (1)..(1): Pra
  MOD_RES (6)..(6): Nle
  source: /note="C-term Amide"
GCQKWLWTCDSARACCEGLRCKLWCRKEI

SEQ ID NO: 1685 - protein, 29 aa, Artificial Sequence
  source: /note="Description of Artificial Sequence: Synthetic peptide"
  source: /note="N-term Amino group"
  MOD_RES (1)..(1): Pra
  MOD_RES (6)..(6): Nle
  source: /note="C-term Amide"
GCQKWLWTCDSKRACCEDLRCKLWCRKEI

SEQ ID NO: 1686 - protein, 29 aa, Artificial Sequence
  source: /note="Description of Artificial Sequence: Synthetic peptide"
  source: /note="N-term Amino group"
  MOD_RES (1)..(1): Pra
  MOD_RES (6)..(6): Nle
  source: /note="C-term Amide"
GCQKWLWTCDSERACCEDLRCKLWCRKEI

SEQ ID NO: 1687 - protein, 29 aa, Artificial Sequence
  source: /note="Description of Artificial Sequence: Synthetic peptide"
  source: /note="N-term Amino group"
  MOD_RES (1)..(1): Pra
  MOD_RES (6)..(6): Nle
  source: /note="C-term Amide"
GCQKWLWTCDSERACCEDLVCKLWCRKEI

SEQ ID NO: 1688 - protein, 29 aa, Artificial Sequence
  source: /note="Description of Artificial Sequence: Synthetic peptide"
  source: /note="N-term Amino group"
  MOD_RES (1)..(1): Pra
  MOD_RES (6)..(6): Nle
  source: /note="C-term Amide"
GCQKWLWTCDSKRACCEGLVCKLWCRKEI

SEQ ID NO: 1689 - protein, 29 aa, Artificial Sequence
  source: /note="Description of Artificial Sequence: Synthetic peptide"
  source: /note="N-term Amino group"
  MOD_RES (1)..(1): Pra
  MOD_RES (6)..(6): Nle
  source: /note="C-term Amide"
GCQKWLWTCDSKRACCEGLRCKLWCRYEI

SEQ ID NO: 1690 - protein, 29 aa, Artificial Sequence
  source: /note="Description of Artificial Sequence: Synthetic peptide"
  source: /note="N-term Amino group"
  MOD_RES (1)..(1): Pra
  MOD_RES (6)..(6): Nle
  source: /note="C-term Amide"
GCQKWLWTCDSKRACCEGLRCKLWCRLEI

SEQ ID NO: 1691 - protein, 29 aa, Artificial Sequence
  source: /note="Description of Artificial Sequence: Synthetic peptide"
  source: /note="N-term Amino group"
  MOD_RES (1)..(1): CyA
  MOD_RES (6)..(6): Nle
  MOD_RES (17)..(17): Pra
  source: /note="C-term Amide"
ACQKWLWTCDEERACCGGLVCKLWCRKII

SEQ ID NO: 1692 - protein, 30 aa, Artificial Sequence; identical to SEQ ID NO: 395
  source: /note="Description of Artificial Sequence: Synthetic polypeptide"
  source: /note="N-term Amino group"
  MOD_RES (1)..(1): CyA
  MOD_RES (7)..(7): Nle
  MOD_RES (18)..(18): Pra modified with a unique side chain
  source: /note="C-term Amide"
  source: /note="see specification as filed for detailed description of substitutions and preferred embodiments"

SEQ ID NO: 1693 - protein, 30 aa, Artificial Sequence; identical to SEQ ID NO: 338
  source: /note="Description of Artificial Sequence: Synthetic polypeptide"
  source: /note="N-term Amino group"
  MOD_RES (1)..(1): Atz
  MOD_RES (7)..(7): Nle
  MOD_RES (25)..(25): 5-Br-Trp
  source: /note="C-term Amide"

SEQ ID NO: 1694 - protein, 30 aa, Artificial Sequence
  source: /note="Description of Artificial Sequence: Synthetic polypeptide"
  source: /note="N-term Amino group"
  MOD_RES (2)..(2): Atz
  MOD_RES (7)..(7): Nle
  source: /note="C-term Amide"
EACQKWLWTCDSKRECCEGLRCKLWCRKEI

SEQ ID NO: 1695 - protein, 215 aa, Artificial Sequence
  source: /note="Description of Artificial Sequence: Synthetic polypeptide"
EIVLTQSPGTLSLSPGERATLSCRASQGISRSELAWYQQKPGQAPSLLIYGASSRATGIPDRFSGSGSGTCFTLTISRLEPEDFAVYYCQQFGSSPWTFGQGTKVEIKRTVAAPSVFIFPPSDEQLKSGTASVVCLLNNFYPREAKVQWKVDNALQSGNSQESVTEQDSKDSTYSLSSTLTLSKADYEKHKVYACEVTHQGLSSPVTKSFNRGEC

SEQ ID NO: 1696 - protein, 215 aa, Artificial Sequence
  source: /note="Description of Artificial Sequence: Synthetic polypeptide"
EIVLTQSPGTLSLSPGERATLSCRASQGISRSELAWYQQKPGQAPSLLIYGASSRATGIPDRFSGSGSGTDFTLTISRLEPEDFAVYYCQQFGSSPWTFGQGTKVEIKRTCAAPSVFIFPPSDEQLKSGTASVVCLLNNFYPREAKVQWKVDNALQSGNSQESVTEQDSKDSTYSLSSTLTLSKADYEKHKVYACEVTHQGLSSPVTKSFNRGEC

SEQ ID NO: 1697 - protein, 215 aa, Artificial Sequence
  source: /note="Description of Artificial Sequence: Synthetic polypeptide"
EIVLTQSPGTLSLSPGERATLSCRASQGISRSELAWYQQKPGQAPSLLIYGASSRATGIPDRFSGSGSGTDFTLTISRLEPEDFAVYYCQQFGSSPWTFGQGTKVEIKRTVACPSVFIFPPSDEQLKSGTASVVCLLNNFYPREAKVQWKVDNALQSGNSQESVTEQDSKDSTYSLSSTLTLSKADYEKHKVYACEVTHQGLSSPVTKSFNRGEC

SEQ ID NO: 1698 - protein, 215 aa, Artificial Sequence
  source: /note="Description of Artificial Sequence: Synthetic polypeptide"
EIVLTQSPGTLSLSPGERATLSCRASQGISRSELAWYQQKPGQAPSLLIYGASSRATGIPDRFSGSGSGTDFTLTISRLEPEDFAVYYCQQFGSSPWTFGQGTKVEIKRTVAAPSVFIFPPSDEQLKSGTASVVCLLNNFYPREAKVQWKVDNALQSGNSQESVTEQDSKDSTYSLSSTLTLSKADYEKHKVYACEVTHQGLSSPVTKSFNRGEC

SEQ ID NO: 1699 - protein, 215 aa, Artificial Sequence; identical to SEQ ID NO: 1698
  source: /note="Description of Artificial Sequence: Synthetic polypeptide"

SEQ ID NO: 1700 - protein, 215 aa, Artificial Sequence; identical to SEQ ID NO: 1698
  source: /note="Description of Artificial Sequence: Synthetic polypeptide"

SEQ ID NO: 1701 - protein, 215 aa, Artificial Sequence; identical to SEQ ID NO: 1698
  source: /note="Description of Artificial Sequence: Synthetic polypeptide"

SEQ ID NO: 1702 - protein, 215 aa, Artificial Sequence; identical to SEQ ID NO: 1698
  source: /note="Description of Artificial Sequence: Synthetic polypeptide"

SEQ ID NO: 1703 - protein, 215 aa, Artificial Sequence; identical to SEQ ID NO: 1698
  source: /note="Description of Artificial Sequence: Synthetic polypeptide"

SEQ ID NO: 1704 - protein, 215 aa, Artificial Sequence; identical to SEQ ID NO: 1698
  source: /note="Description of Artificial Sequence: Synthetic polypeptide"

SEQ ID NO: 1705 - protein, 215 aa, Artificial Sequence; identical to SEQ ID NO: 1698
  source: /note="Description of Artificial Sequence: Synthetic polypeptide"

SEQ ID NO: 1706 - protein, 215 aa, Artificial Sequence; identical to SEQ ID NO: 1698
  source: /note="Description of Artificial Sequence: Synthetic polypeptide"

SEQ ID NO: 1707 - protein, 215 aa, Artificial Sequence; identical to SEQ ID NO: 1698
  source: /note="Description of Artificial Sequence: Synthetic polypeptide"

SEQ ID NO: 1708 - protein, 215 aa, Artificial Sequence; identical to SEQ ID NO: 1698
  source: /note="Description of Artificial Sequence: Synthetic polypeptide"

SEQ ID NO: 1709 - protein, 215 aa, Artificial Sequence; identical to SEQ ID NO: 1698
  source: /note="Description of Artificial Sequence: Synthetic polypeptide"

SEQ ID NO: 1710 - protein, 215 aa, Artificial Sequence; identical to SEQ ID NO: 1698
  source: /note="Description of Artificial Sequence: Synthetic polypeptide"

SEQ ID NO: 1711 - protein, 215 aa, Artificial Sequence; identical to SEQ ID NO: 1698
  source: /note="Description of Artificial Sequence: Synthetic polypeptide"

SEQ ID NO: 1712 - protein, 215 aa, Artificial Sequence; identical to SEQ ID NO: 1698
  source: /note="Description of Artificial Sequence: Synthetic polypeptide"

SEQ ID NO: 1713 - protein, 215 aa, Artificial Sequence; identical to SEQ ID NO: 1698
  source: /note="Description of Artificial Sequence: Synthetic polypeptide"

SEQ ID NO: 1714 - protein, 215 aa, Artificial Sequence; identical to SEQ ID NO: 1698
  source: /note="Description of Artificial Sequence: Synthetic polypeptide"

SEQ ID NO: 1715 - protein, 452 aa, Artificial Sequence
  source: /note="Description of Artificial Sequence: Synthetic polypeptide"
QVQLQESGPGLVKPSQTLSLTCTVSGGSISSGDYFWSWIRQLPGKGLEWIGHIHNSGTTYYNPSLKSRVTISVDTSKKQFSLRLSSVTAADTAVYYCARDRGGDYAYGMDVWGQGTTVTVSSASTKGPSVFPLAPSSKSTSGGTAALGCLVKDYFPEPVTVSWNSGALTSGVHTFPAVLQSSGLYSLSSVVTVPSSSLGTQTYICNVNHKPSNTKVDKRVEPKSCDKTHTCPPCPAPELLGGPSVFLFPPKPKDTLMISRTPEVTCVVVDVSHEDPEVKFNWYVDGVEVHNAKTKPREEQYGSTYRVVSVLTVLHQDWLNGKEYKCKVSNKALPAPIEKTISKAKGQPREPQVYTLPPSREEMTKNQVSLTCLVKGFYPSDIAVEWESNGQPENNYKTTPPVLDSDGSFFLYSKLTVDKSRWQQGNVFSCSVMHEALHNHYTQKSLSLSPGK

SEQ ID NO: 1716 - protein, 452 aa, Artificial Sequence; identical to SEQ ID NO: 1715
  source: /note="Description of Artificial Sequence: Synthetic polypeptide"

SEQ ID NO: 1717 - protein, 452 aa, Artificial Sequence; identical to SEQ ID NO: 1715
  source: /note="Description of Artificial Sequence: Synthetic polypeptide"

SEQ ID NO: 1718 - protein, 452 aa, Artificial Sequence
  source: /note="Description of Artificial Sequence: Synthetic polypeptide"
QVQLQESGPGLVKPSQTLSLTCTVSGGSISSGDYFWSWIRQLPGKGLEWIGHIHNSGTTYYNPSLKSRVTISVDTSKKQFSLRLSSVTACDTAVYYCARDRGGDYAYGMDVWGQGTTVTVSSASTKGPSVFPLAPSSKSTSGGTAALGCLVKDYFPEPVTVSWNSGALTSGVHTFPAVLQSSGLYSLSSVVTVPSSSLGTQTYICNVNHKPSNTKVDKRVEPKSCDKTHTCPPCPAPELLGGPSVFLFPPKPKDTLMISRTPEVTCVVVDVSHEDPEVKFNWYVDGVEVHNAKTKPREEQYGSTYRVVSVLTVLHQDWLNGKEYKCKVSNKALPAPIEKTISKAKGQPREPQVYTLPPSREEMTKNQVSLTCLVKGFYPSDIAVEWESNGQPENNYKTTPPVLDSDGSFFLYSKLTVDKSRWQQGNVFSCSVMHEALHNHYTQKSLSLSPGK

SEQ ID NO: 1719 - protein, 452 aa, Artificial Sequence
  source: /note="Description of Artificial Sequence: Synthetic polypeptide"
QVQLQESGPGLVKPSQTLSLTCTVSGGSISSGDYFWSWIRQLPGKGLEWIGHIHNSGTTYYNPSLKSRVTISVDTSKKQFSLRLSSVTAADTAVYYCARDRGGDYAYGMDVWGQGTTVTVSSCSTKGPSVFPLAPSSKSTSGGTAALGCLVKDYFPEPVTVSWNSGALTSGVHTFPAVLQSSGLYSLSSVVTVPSSSLGTQTYICNVNHKPSNTKVDKRVEPKSCDKTHTCPPCPAPELLGGPSVFLFPPKPKDTLMISRTPEVTCVVVDVSHEDPEVKFNWYVDGVEVHNAKTKPREEQYGSTYRVVSVLTVLHQDWLNGKEYKCKVSNKALPAPIEKTISKAKGQPREPQVYTLPPSREEMTKNQVSLTCLVKGFYPSDIAVEWESNGQPENNYKTTPPVLDSDGSFFLYSKLTVDKSRWQQGNVFSCSVMHEALHNHYTQKSLSLSPGK

SEQ ID NO: 1720 - protein, 452 aa, Artificial Sequence
  source: /note="Description of Artificial Sequence: Synthetic polypeptide"
QVQLQESGPGLVKPSQTLSLTCTVSGGSISSGDYFWSWIRQLPGKGLEWIGHIHNSGTTYYNPSLKSRVTISVDTSKKQFSLRLSSVTAADTAVYYCARDRGGDYAYGMDVWGQGTTVTVSSASTKGPCVFPLAPSSKSTSGGTAALGCLVKDYFPEPVTVSWNSGALTSGVHTFPAVLQSSGLYSLSSVVTVPSSSLGTQTYICNVNHKPSNTKVDKRVEPKSCDKTHTCPPCPAPELLGGPSVFLFPPKPKDTLMISRTPEVTCVVVDVSHEDPEVKFNWYVDGVEVHNAKTKPREEQYGSTYRVVSVLTVLHQDWLNGKEYKCKVSNKALPAPIEKTISKAKGQPREPQVYTLPPSREEMTKNQVSLTCLVKGFYPSDIAVEWESNGQPENNYKTTPPVLDSDGSFFLYSKLTVDKSRWQQGNVFSCSVMHEALHNHYTQKSLSLSPGK

SEQ ID NO: 1721 - protein, 452 aa, Artificial Sequence
  source: /note="Description of Artificial Sequence: Synthetic polypeptide"
QVQLQESGPGLVKPSQTLSLTCTVSGGSISSGDYFWSWIRQLPGKGLEWIGHIHNSGTTYYNPSLKSRVTISVDTSKKQFSLRLSSVTAADTAVYYCARDRGGDYAYGMDVWGQGTTVTVSSASTKGPSVFPLAPSSKSTSGGTAALGCLVKDYFPCPVTVSWNSGALTSGVHTFPAVLQSSGLYSLSSVVTVPSSSLGTQTYICNVNHKPSNTKVDKRVEPKSCDKTHTCPPCPAPELLGGPSVFLFPPKPKDTLMISRTPEVTCVVVDVSHEDPEVKFNWYVDGVEVHNAKTKPREEQYGSTYRVVSVLTVLHQDWLNGKEYKCKVSNKALPAPIEKTISKAKGQPREPQVYTLPPSREEMTKNQVSLTCLVKGFYPSDIAVEWESNGQPENNYKTTPPVLDSDGSFFLYSKLTVDKSRWQQGNVFSCSVMHEALHNHYTQKSLSLSPGK

SEQ ID NO: 1722 - protein, 452 aa, Artificial Sequence
  source: /note="Description of Artificial Sequence: Synthetic polypeptide"
QVQLQESGPGLVKPSQTLSLTCTVSGGSISSGDYFWSWIRQLPGKGLEWIGHIHNSGTTYYNPSLKSRVTISVDTSKKQFSLRLSSVTAADTAVYYCARDRGGDYAYGMDVWGQGTTVTVSSASTKGPSVFPLAPSSKSTSGGTAALGCLVKDYFPEPVTVSWNSGALTSGVHTFPAVLQSSGLYSLSSVVTVPSSSLGTQTYICNVNHKPSNTKVDKRVEPKSCDKTHTCPPCPAPELLGGPSVFLFPPKPKDTLMISRTPEVTCVVVCVSHEDPEVKFNWYVDGVEVHNAKTKPREEQYGSTYRVVSVLTVLHQDWLNGKEYKCKVSNKALPAPIEKTISKAKGQPREPQVYTLPPSREEMTKNQVSLTCLVKGFYPSDIAVEWESNGQPENNYKTTPPVLDSDGSFFLYSKLTVDKSRWQQGNVFSCSVMHEALHNHYTQKSLSLSPGK

SEQ ID NO: 1723 - protein, 452 aa, Artificial Sequence
  source: /note="Description of Artificial Sequence: Synthetic polypeptide"
QVQLQESGPGLVKPSQTLSLTCTVSGGSISSGDYFWSWIRQLPGKGLEWIGHIHNSGTTYYNPSLKSRVTISVDTSKKQFSLRLSSVTAADTAVYYCARDRGGDYAYGMDVWGQGTTVTVSSASTKGPSVFPLAPSSKSTSGGTAALGCLVKDYFPEPVTVSWNSGALTSGVHTFPAVLQSSGLYSLSSVVTVPSSSLGTQTYICNVNHKPSNTKVDKRVEPKSCDKTHTCPPCPAPELLGGPSVFLFPPKPKDTLMISRTPEVTCVVVDVSHEDPCVKFNWYVDGVEVHNAKTKPREEQYGSTYRVVSVLTVLHQDWLNGKEYKCKVSNKALPAPIEKTISKAKGQPREPQVYTLPPSREEMTKNQVSLTCLVKGFYPSDIAVEWESNGQPENNYKTTPPVLDSDGSFFLYSKLTVDKSRWQQGNVFSCSVMHEALHNHYTQKSLSLSPGK

SEQ ID NO: 1724 - protein, 452 aa, Artificial Sequence
  source: /note="Description of Artificial Sequence: Synthetic polypeptide"
QVQLQESGPGLVKPSQTLSLTCTVSGGSISSGDYFWSWIRQLPGKGLEWIGHIHNSGTTYYNPSLKSRVTISVDTSKKQFSLRLSSVTAADTAVYYCARDRGGDYAYGMDVWGQGTTVTVSSASTKGPSVFPLAPSSKSTSGGTAALGCLVKDYFPEPVTVSWNSGALTSGVHTFPAVLQSSGLYSLSSVVTVPSSSLGTQTYICNVNHKPSNTKVDKRVEPKSCDKTHTCPPCPAPELLGGPSVFLFPPKPKDTLMISRTPEVTCVVVDVSHEDPEVKFNWYVDGVEVHNAKTKPREEQYGSTCRVVSVLTVLHQDWLNGKEYKCKVSNKALPAPIEKTISKAKGQPREPQVYTLPPSREEMTKNQVSLTCLVKGFYPSDIAVEWESNGQPENNYKTTPPVLDSDGSFFLYSKLTVDKSRWQQGNVFSCSVMHEALHNHYTQKSLSLSPGK

SEQ ID NO: 1725 - protein, 452 aa, Artificial Sequence
  source: /note="Description of Artificial Sequence: Synthetic polypeptide"
QVQLQESGPGLVKPSQTLSLTCTVSGGSISSGDYFWSWIRQLPGKGLEWIGHIHNSGTTYYNPSLKSRVTISVDTSKKQFSLRLSSVTAADTAVYYCARDRGGDYAYGMDVWGQGTTVTVSSASTKGPSVFPLAPSSKSTSGGTAALGCLVKDYFPEPVTVSWNSGALTSGVHTFPAVLQSSGLYSLSSVVTVPSSSLGTQTYICNVNHKPSNTKVDKRVEPKSCDKTHTCPPCPAPELLGGPSVFLFPPKPKDTLMISRTPEVTCVVVDVSHEDPEVKFNWYVDGVEVHNAKTKPREEQYGSTYRVVSVLTVLHQDWLNGKEYKCKVSNKALPAPIEKTISKAKGQPRCPQVYTLPPSREEMTKNQVSLTCLVKGFYPSDIAVEWESNGQPENNYKTTPPVLDSDGSFFLYSKLTVDKSRWQQGNVFSCSVMHEALHNHYTQKSLSLSPGK

SEQ ID NO: 1726 - protein, 452 aa, Artificial Sequence
  source: /note="Description of Artificial Sequence: Synthetic polypeptide"
QVQLQESGPGLVKPSQTLSLTCTVSGGSISSGDYFWSWIRQLPGKGLEWIGHIHNSGTTYYNPSLKSRVTISVDTSKKQFSLRLSSVTAADTAVYYCARDRGGDYAYGMDVWGQGTTVTVSSASTKGPSVFPLAPSSKSTSGGTAALGCLVKDYFPEPVTVSWNSGALTSGVHTFPAVLQSSGLYSLSSVVTVPSSSLGTQTYICNVNHKPSNTKVDKRVEPKSCDKTHTCPPCPAPELLGGPSVFLFPPKPKDTLMISRTPEVTCVVVDVSHEDPEVKFNWYVDGVEVHNAKTKPREEQYGSTYRVVSVLTVLHQDWLNGKEYKCKVSNKALPAPIEKTISKAKGQPREPQVYTLPPSREECTKNQVSLTCLVKGFYPSDIAVEWESNGQPENNYKTTPPVLDSDGSFFLYSKLTVDKSRWQQGNVFSCSVMHEALHNHYTQKSLSLSPGK

SEQ ID NO: 1727 - protein, 452 aa, Artificial Sequence
  source: /note="Description of Artificial Sequence: Synthetic polypeptide"
QVQLQESGPGLVKPSQTLSLTCTVSGGSISSGDYFWSWIRQLPGKGLEWIGHIHNSGTTYYNPSLKSRVTISVDTSKKQFSLRLSSVTAADTAVYYCARDRGGDYAYGMDVWGQGTTVTVSSASTKGPSVFPLAPSSKSTSGGTAALGCLVKDYFPEPVTVSWNSGALTSGVHTFPAVLQSSGLYSLSSVVTVPSSSLGTQTYICNVNHKPSNTKVDKRVEPKSCDKTHTCPPCPAPELLGGPSVFLFPPKPKDTLMISRTPEVTCVVVDVSHEDPEVKFNWYVDGVEVHNAKTKPREEQYGSTYRVVSVLTVLHQDWLNGKEYKCKVSNKALPAPIEKTISKAKGQPREPQVYTLPPSREEMCKNQVSLTCLVKGFYPSDIAVEWESNGQPENNYKTTPPVLDSDGSFFLYSKLTVDKSRWQQGNVFSCSVMHEALHNHYTQKSLSLSPGK

SEQ ID NO: 1728 - protein, 452 aa, Artificial Sequence
  source: /note="Description of Artificial Sequence: Synthetic polypeptide"
QVQLQESGPGLVKPSQTLSLTCTVSGGSISSGDYFWSWIRQLPGKGLEWIGHIHNSGTTYYNPSLKSRVTISVDTSKKQFSLRLSSVTAADTAVYYCARDRGGDYAYGMDVWGQGTTVTVSSASTKGPSVFPLAPSSKSTSGGTAALGCLVKDYFPEPVTVSWNSGALTSGVHTFPAVLQSSGLYSLSSVVTVPSSSLGTQTYICNVNHKPSNTKVDKRVEPKSCDKTHTCPPCPAPELLGGPSVFLFPPKPKDTLMISRTPEVTCVVVDVSHEDPEVKFNWYVDGVEVHNAKTKPREEQYGSTYRVVSVLTVLHQDWLNGKEYKCKVSNKALPAPIEKTISKAKGQPREPQVYTLPPSREEMTKCQVSLTCLVKGFYPSDIAVEWESNGQPENNYKTTPPVLDSDGSFFLYSKLTVDKSRWQQGNVFSCSVMHEALHNHYTQKSLSLSPGK

SEQ ID NO: 1729 - protein, 452 aa, Artificial Sequence
  source: /note="Description of Artificial Sequence: Synthetic polypeptide"
QVQLQESGPGLVKPSQTLSLTCTVSGGSISSGDYFWSWIRQLPGKGLEWIGHIHNSGTTYYNPSLKSRVTISVDTSKKQFSLRLSSVTAADTAVYYCARDRGGDYAYGMDVWGQGTTVTVSSASTKGPSVFPLAPSSKSTSGGTAALGCLVKDYFPEPVTVSWNSGALTSGVHTFPAVLQSSGLYSLSSVVTVPSSSLGTQTYICNVNHKPSNTKVDKRVEPKSCDKTHTCPPCPAPELLGGPSVFLFPPKPKDTLMISRTPEVTCVVVDVSHEDPEVKFNWYVDGVEVHNAKTKPREEQYGSTYRVVSVLTVLHQDWLNGKEYKCKVSNKALPAPIEKTISKAKGQPREPQVYTLPPSREEMTKNCVSLTCLVKGFYPSDIAVEWESNGQPENNYKTTPPVLDSDGSFFLYSKLTVDKSRWQQGNVFSCSVMHEALHNHYTQKSLSLSPGK

SEQ ID NO: 1730 - protein, 452 aa, Artificial Sequence
  source: /note="Description of Artificial Sequence: Synthetic polypeptide"
QVQLQESGPGLVKPSQTLSLTCTVSGGSISSGDYFWSWIRQLPGKGLEWIGHIHNSGTTYYNPSLKSRVTISVDTSKKQFSLRLSSVTAADTAVYYCARDRGGDYAYGMDVWGQGTTVTVSSASTKGPSVFPLAPSSKSTSGGTAALGCLVKDYFPEPVTVSWNSGALTSGVHTFPAVLQSSGLYSLSSVVTVPSSSLGTQTYICNVNHKPSNTKVDKRVEPKSCDKTHTCPPCPAPELLGGPSVFLFPPKPKDTLMISRTPEVTCVVVDVSHEDPEVKFNWYVDGVEVHNAKTKPREEQYGSTYRVVSVLTVLHQDWLNGKEYKCKVSNKALPAPIEKTISKAKGQPREPQVYTLPPSREEMTKNQVSLTCLVKGFYPSDIAVEWESNGQPCNNYKTTPPVLDSDGSFFLYSKLTVDKSRWQQGNVFSCSVMHEALHNHYTQKSLSLSPGK

SEQ ID NO: 1731 - protein, 452 aa, Artificial Sequence
  source: /note="Description of Artificial Sequence: Synthetic polypeptide"
QVQLQESGPGLVKPSQTLSLTCTVSGGSISSGDYFWSWIRQLPGKGLEWIGHIHNSGTTYYNPSLKSRVTISVDTSKKQFSLRLSSVTAADTAVYYCARDRGGDYAYGMDVWGQGTTVTVSSASTKGPSVFPLAPSSKSTSGGTAALGCLVKDYFPEPVTVSWNSGALTSGVHTFPAVLQSSGLYSLSSVVTVPSSSLGTQTYICNVNHKPSNTKVDKRVEPKSCDKTHTCPPCPAPELLGGPSVFLFPPKPKDTLMISRTPEVTCVVVDVSHEDPEVKFNWYVDGVEVHNAKTKPREEQYGSTYRVVSVLTVLHQDWLNGKEYKCKVSNKALPAPIEKTISKAKGQPREPQVYTLPPSREEMTKNQVSLTCLVKGFYPSDIAVEWESNGQPENCYKTTPPVLDSDGSFFLYSKLTVDKSRWQQGNVFSCSVMHEALHNHYTQKSLSLSPGK

SEQ ID NO: 1732 - protein, 452 aa, Artificial Sequence
  source: /note="Description of Artificial Sequence: Synthetic polypeptide"
QVQLQESGPGLVKPSQTLSLTCTVSGGSISSGDYFWSWIRQLPGKGLEWIGHIHNSGTTYYNPSLKSRVTISVDTSKKQFSLRLSSVTAADTAVYYCARDRGGDYAYGMDVWGQGTTVTVSSASTKGPSVFPLAPSSKSTSGGTAALGCLVKDYFPEPVTVSWNSGALTSGVHTFPAVLQSSGLYSLSSVVTVPSSSLGTQTYICNVNHKPSNTKVDKRVEPKSCDKTHTCPPCPAPELLGGPSVFLFPPKPKDTLMISRTPEVTCVVVDVSHEDPEVKFNWYVDGVEVHNAKTKPREEQYGSTYRVVSVLTVLHQDWLNGKEYKCKVSNKALPAPIEKTISKAKGQPREPQVYTLPPSREEMTKNQVSLTCLVKGFYPSDIAVEWESNGQPENNYKTTPPVLDSDGSFFLYSKLTVCKSRWQQGNVFSCSVMHEALHNHYTQKSLSLSPGK

SEQ ID NO: 1733 - protein, 452 aa, Artificial Sequence
  source: /note="Description of Artificial Sequence: Synthetic polypeptide"
QVQLQESGPGLVKPSQTLSLTCTVSGGSISSGDYFWSWIRQLPGKGLEWIGHIHNSGTTYYNPSLKSRVTISVDTSKKQFSLRLSSVTAADTAVYYCARDRGGDYAYGMDVWGQGTTVTVSSASTKGPSVFPLAPSSKSTSGGTAALGCLVKDYFPEPVTVSWNSGALTSGVHTFPAVLQSSGLYSLSSVVTVPSSSLGTQTYICNVNHKPSNTKVDKRVEPKSCDKTHTCPPCPAPELLGGPSVFLFPPKPKDTLMISRTPEVTCVVVDVSHEDPEVKFNWYVDGVEVHNAKTKPREEQYGSTYRVVSVLTVLHQDWLNGKEYKCKVSNKALPAPIEKTISKAKGQPREPQVYTLPPSREEMTKNQVSLTCLVKGFYPSDIAVEWESNGQPENNYKTTPPVLDSDGSFFLYSKLTVDKCRWQQGNVFSCSVMHEALHNHYTQKSLSLSPGK

SEQ ID NO: 1734 - protein, 452 aa, Artificial Sequence
  source: /note="Description of Artificial Sequence: Synthetic polypeptide"
QVQLQESGPGLVKPSQTLSLTCTVSGGSISSGDYFWSWIRQLPGKGLEWIGHIHNSGTTYYNPSLKSRVTISVDTSKKQFSLRLSSVTAADTAVYYCARDRGGDYAYGMDVWGQGTTVTVSSASTKGPSVFPLAPSSKSTSGGTAALGCLVKDYFPEPVTVSWNSGALTSGVHTFPAVLQSSGLYSLSSVVTVPSSSLGTQTYICNVNHKPSNTKVDKRVEPKSCDKTHTCPPCPAPELLGGPSVFLFPPKPKDTLMISRTPEVTCVVVDVSHEDPEVKFNWYVDGVEVHNAKTKPREEQYGSTYRVVSVLTVLHQDWLNGKEYKCKVSNKALPAPIEKTISKAKGQPREPQVYTLPPSREEMTKNQVSLTCLVKGFYPSDIAVEWESNGQPENNYKTTPPVLDSDGSFFLYSKLTVDKSRWQQGNVFSCSVMHEALHNHYTQKSLCLSPGK

SEQ ID NO: 1735 - protein, 227 aa, Artificial Sequence
  source: /note="Description of Artificial Sequence: Synthetic polypeptide"
DKTHTCPPCPAPELLGGPSVFLFPPKPKDTLMISRTPEVTCVVVDVSHEDPEVKFNWYVDGVEVHNAKTKPREEQYGSTYRVVSVLTVLHQDWLNGKEYKCKVSNKALPAPIEKTISKAKGQPRCPQVYTLPPSREEMTKNQVSLTCLVKGFYPSDIAVEWESNGQPENNYKTTPPVLDSDGSFFLYSKLTVDKSRWQQGNVFSCSVMHEALHNHYTQKSLSLSPGK

SEQ ID NO: 1736 - protein, 227 aa, Artificial Sequence
  source: /note="Description of Artificial Sequence: Synthetic polypeptide"
DKTHTCPPCPAPELLGGPSVFLFPPKPKDTLMISRTPEVTCVVVDVSHEDPEVKFNWYVDGVEVHNAKTKPREEQYGSTYRVVSVLTVLHQDWLNGKEYKCKVSNKALPAPIEKTISKAKGQPREPQVYTLPPSREEMTKCQVSLTCLVKGFYPSDIAVEWESNGQPENNYKTTPPVLDSDGSFFLYSKLTVDKSRWQQGNVFSCSVMHEALHNHYTQKSLSLSPGK

SEQ ID NO: 1737 - protein, 227 aa, Artificial Sequence
  source: /note="Description of Artificial Sequence: Synthetic polypeptide"
DKTHTCPPCPAPELLGGPSVFLFPPKPKDTLMISRTPEVTCVVVDVSHEDPEVKFNWYVDGVEVHNAKTKPREEQYGSTYRVVSVLTVLHQDWLNGKEYKCKVSNKALPAPIEKTISKAKGQPREPQVYTLPPSREEMTKNCVSLTCLVKGFYPSDIAVEWESNGQPENNYKTTPPVLDSDGSFFLYSKLTVDKSRWQQGNVFSCSVMHEALHNHYTQKSLSLSPGK

SEQ ID NO: 1738 - protein, 227 aa, Artificial Sequence
  source: /note="Description of Artificial Sequence: Synthetic polypeptide"
DKTHTCPPCPAPELLGGPSVFLFPPKPKDTLMISRTPEVTCVVVDVSHEDPEVKFNWYVDGVEVHNAKTKPREEQYGSTYRVVSVLTVLHQDWLNGKEYKCKVSNKALPAPIEKTISKAKGQPREPQVYTLPPSREEMTKNQVSLTCLVKGFYPSDIAVEWESNGQPENCYKTTPPVLDSDGSFFLYSKLTVDKSRWQQGNVFSCSVMHEALHNHYTQKSLSLSPGK

SEQ ID NO: 1739 - protein, 227 aa, Artificial Sequence
  source: /note="Description of Artificial Sequence: Synthetic polypeptide"
DKTHTCPPCPAPELLGGPSVFLFPPKPKDTLMISRTPEVTCVVVDVSHEDPEVKFNWYVDGVEVHNAKTKPREEQYGSTYRVVSVLTVLHQDWLNGKEYKCKVSNKALPAPIEKTISKAKGQPREPQVYTLPPSREEMTKNQVSLTCLVKGFYPSDIAVEWESNGQPENNYKTTPPVCDSDGSFFLYSKLTVDKSRWQQGNVFSCSVMHEALHNHYTQKSLSLSPGK

SEQ ID NO: 1740 - protein, 227 aa, Artificial Sequence
  source: /note="Description of Artificial Sequence: Synthetic polypeptide"
DKTHTCPPCPAPELLGGPSVFLFPPKPKDTLMISRTPEVTCVVVDVSHEDPEVKFNWYVDGVEVHNAKTKPREEQYGSTYRVVSVLTVLHQDWLNGKEYKCKVSNKALPAPIEKTISKAKGQPREPQVYTLPPSREEMTKNQVSLTCLVKGFYPSDIAVEWESNGQPENNYKTTPPVLDSDGSFFLYSKLTVCKSRWQQGNVFSCSVMHEALHNHYTQKSLSLSPGK

SEQ ID NO: 1741 - protein, 227 aa, Artificial Sequence
  source: /note="Description of Artificial Sequence: Synthetic polypeptide"
DKTHTCPPCPAPELLGGPSVFLFPPKPKDTLMISRTPEVTCVVVDVSHEDPEVKFNWYVDGVEVHNAKTKPREEQYNSTYRVVSVLTVLHQDWLNGKEYKCKVSNKALPAPIEKTISKAKGQPREPQVYTLPPSREEMCKNQVSLTCLVKGFYPSDIAVEWESNGQPENNYKTTPPVLDSDGSFFLYSKLTVDKSRWQQGNVFSCSVMHEALHNHYTQKSLSLSPGK

SEQ ID NO: 1742 - protein, 452 aa, Artificial Sequence
  source: /note="Description of Artificial Sequence: Synthetic polypeptide"
QVQLQESGPGLVKPSQTLSLTCTVSGGSISSGDYFWSWIRQLPGKGLEWIGHIHNSGTTYYNPSLKSRVTISVDTSKKQFSLRLSSVTAADTAVYYCARDRGGDYAYGMDVWGQGTTVTVSSASTKGPSVFPLAPSSKSTSGGTAALGCLVKDYFPEPVTVSWNSGALTSGVHTFPAVLQSSGLYSLSSVVTVPSSSLGTQTYICNVNHKPSNTKVDKRVEPKSCDKTHTCPPCPAPELLGGPSVFLFPPKPKDTLMISRTPEVTCVVVDVSHEDPEVKFNWYVDGVEVHNAKTKPREEQYNSTYRVVSVLTVLHQDWLNGKEYKCKVSNKALPAPIEKTISKAKGQPREPQVYTLPPSREEMTKNQVSLTCLVKGFYPSDIAVEWESNGQPENNYKTTPPVLDSDGSFFLYSKLTVDKSRWQQGNVFSCSVMHEALHNHYTQKSLSLSPGK

SEQ ID NO: 1743 - protein, 452 aa, Artificial Sequence
  source: /note="Description of Artificial Sequence: Synthetic polypeptide"
QVQLQESGPGLVKPSQTLSLTCTVSGGSISSGDYFWSWIRQLPGKGLEWIGHIHNSGTTYYNPSLKSRVTISVDTSKKQFSLRLSSVTACDTAVYYCARDRGGDYAYGMDVWGQGTTVTVSSAVSWNSGALTSGVHTFPAVLQSSGLYSLSSVVTVPSSSLGTQTYICNVNHKPSNTKVDKRVEPKSCDKTHTCPPCPAPELLSTKGPSVFPLAPSSKSTSGGTAALGCLVKDYFPEPVTGGPSVFLFPPKPKDTLMISRTPEVTCVVVDVSHEDPEVKFNWYVDGVEVHNAKTKPREEQYNSTYRVVSVLTVLHQDWLNGKEYKCKVSNKALPAPIEKTISKAKGQPREPQVYTLPPSREEMTKNQVSLTCLVKGFYPSDIAVEWESNGQPENNYKTTPPVLDSDGSFFLYSKLTVDKSRWQQGNVFSCSVMHEALHNHYTQKSLSLSPGK

SEQ ID NO: 1744 - protein, 215 aa, Artificial Sequence
  source: /note="Description of Artificial Sequence: Synthetic polypeptide"
EIVLTQSPGTLSLSPGERATLSCRASQGISRSELAWYQQKPGQAPSLLIYGASSRATGIPDRFSGSGSGTDFTLTISRLEPEDFAVYYCQQFGSSPWTFGQGTKVEIKRTVAAPSVFIFPPSDEQLKSQESVTEQDSKDSTYSLSSTLTLSKADYEKHKVYACEVTHQGLSSPVTKSFNRGECGTASVVCLLNNFYPREAKVQWKVDNALQSGNS

SEQ ID NO: 1745 - protein, 16 aa, Artificial Sequence
  source: /note="Description of Artificial Sequence: Synthetic peptide"
KKYTYEINGKKITVEI

SEQ ID NO: 1746 - protein, 10 aa, Artificial Sequence
  source: /note="Description of Artificial Sequence: Synthetic peptide"
CHWEGNKLVC

What is claimed:

1. A composition of matter comprising an isolated polypeptide comprising the amino acid sequence of the formula:
Xₐₐ¹Xₐₐ²Xₐₐ³Xₐₐ⁴Xₐₐ⁵Xₐₐ⁶Xₐₐ⁷Xₐₐ⁸Xₐₐ⁹Xₐₐ¹⁰Xₐₐ¹¹Aspₐₐ¹²Xₐₐ¹³Xₐₐ¹⁴Xₐₐ¹⁵Xₐₐ¹⁶Xₐₐ¹⁷Xₐₐ¹⁸Xₐₐ¹⁹Xₐₐ²⁰Leuₐₐ²¹Xₐₐ²²Xₐₐ²³Xₐₐ²⁴Xₐₐ²⁵Xₐₐ²⁶Xₐₐ²⁷Xₐₐ²⁸Xₐₐ²⁹Xₐₐ³⁰Xₐₐ³¹Xₐₐ³²Xₐₐ³³Xₐₐ³⁴//SEQ ID NO:590
or a pharmaceutically acceptable salt thereof,
wherein:
Xₐₐ¹Xₐₐ² is absent; or Xₐₐ¹ is any amino acid residue and Xₐₐ² is any amino acid residue; or
Xₐₐ¹ is absent and Xₐₐ² is any amino acid residue; or Xₐₐ¹ is absent and Xₐₐ² is absent;
Xₐₐ³ is any amino acid residue;
Xₐₐ⁴ is Cys, if Xₐₐ¹⁸ is Cys; or Xₐₐ⁴ is SeCys, if Xₐₐ¹⁸ is SeCys;
Xₐₐ⁵ is any neutral hydrophilic or basic amino acid residue;
Xₐₐ⁶ is any basic or neutral hydrophilic amino acid residue;
Xₐₐ⁷ is a Trp, 5-bromoTrp, 6-bromoTrp, 5-chloroTrp, 6-chloroTrp, 1-Nal, 2-Nal, thioTrp, BhPhe, 2-BrhF, 2-C1hF, 2-FhF, 2-MehF, 2-MeOhF, 3-BrhF, 3-C1hF, 3-FhF, 3-MehF, 3-MeOhF, 4-BrhF, 4-C1hF, 4-FhF, 4-Me-F, 4-MehF, 4-MeOhF residue;
Xₐₐ⁸ is a Met, Nle, Nva, Leu, Ile, Val, or Phe residue;
Xₐₐ⁹ is a Trp, 5-bromoTrp, 6-bromoTrp, 5-chloroTrp, 6-chloroTrp, 1-Nal, 2-Nal, or thioTrp residue;
Xₐₐ¹⁰ is a basic or neutral hydrophilic amino acid residue, or an Ala residue;
Xₐₐ¹¹ is Cys if Xₐₐ²³ is Cys; or Xₐₐ¹¹ is SeCys if Xₐₐ²³ is SeCys;
Xₐₐ¹³ is any amino acid residue;
Xₐₐ¹⁴ is a basic or acidic residue or an Ala residue;
Xₐₐ¹⁵ is an Arg or Cit residue;
Xₐₐ¹⁶ is any amino acid residue;
Xₐₐ¹⁷ is a Cys if Xₐₐ²⁷ is Cys; or Xₐₐ¹⁷ is a SeCys if Xₐₐ²⁷ is SeCys;
Xₐₐ¹⁸ is a Cys or SeCys;
Xₐₐ¹⁹ is any amino acid residue;
Xₐₐ²⁰ is a Gly, Asp or Ala residue;
Xₐₐ²² is an acidic, basic, or neutral hydrophilic amino acid residue, or Ala or Val residue;
Xₐₐ²³ is a Cys or SeCys residue;
Xₐₐ²⁴ is a basic or neutral hydrophilic amino acid or Ala residue;
Xₐₐ²⁵ is an aliphatic hydrophobic residue;
Xₐₐ²⁶ is a Trp, 5-bromoTrp, 6-bromoTrp, 5-chloroTrp, 6-chloroTrp, 7-BrW, 1-Nal, 2-Nal, thioTrp, 5-phenylTrp, 5-iPrTrp, 5-ethylTrp, or 5-MeTrp residue;
Xₐₐ²⁷ is a Cys or SeCys residue;
Xₐₐ²⁸ is a basic or neutral hydrophilic amino acid residue;
Xₐₐ²⁹ is a basic amino acid residue, or a Tyr or Leu residue;
Xₐₐ³⁰ is an Ile, Trp, Tyr, 5-bromoTrp, 6-bromoTrp, 5-chloroTrp, 6-chloroTrp, thioTrp, 1-Nal, or 2-Nal residue, if Xₐₐ²² is an acidic amino acid residue; or
Xₐₐ³⁰ is an acidic amino acid residue or a Pro residue, if Xₐₐ²² is a basic or neutral hydrophilic amino acid residue or an Ala or Val residue;
Xₐₐ³¹ is an Ile, Trp, Phe, BhPhe, Cha, Tyr, 5-bromoTrp, 6-bromoTrp, 5-chloroTrp, 6-chloroTrp, 1-Nal, 2-Nal, thioTrp, or 4-tBu-F residue;
each of Xₐₐ³², Xₐₐ³³, and Xₐₐ³⁴ is independently absent or is independently a hydrophobic or acidic amino acid residue, or a Ser or Gly residue;
and wherein:
if Xₐₐ⁴ and Xₐₐ¹⁸ are both Cys residues, there is a disulfide bond between residue Xₐₐ⁴ and residue Xₐₐ¹⁸; or if Xₐₐ⁴ and Xₐₐ¹⁸ are both SeCys residues, there is a diselenide bond between residue Xₐₐ⁴ and residue Xₐₐ¹⁸;
if Xₐₐ¹¹ and Xₐₐ²³ are both Cys residues, there is a disulfide bond between residue Xₐₐ¹ and residue Xₐₐ²³; or if Xₐₐ¹¹ and Xₐₐ²³ are both SeCys residues, there is a diselenide bond between residue Xₐₐ¹¹ and residue Xₐₐ²³;
if Xₐₐ¹⁷ and Xₐₐ²⁷ are both Cys residues, there is a disulfide bond between residue Xₐₐ¹⁷ and residue Xₐₐ²⁷; or if Xₐₐ¹⁷ and Xₐₐ²⁷ are both SeCys residues, there is a diselenide bond between residue Xₐₐ¹⁷ and residue Xₐₐ²⁷;
the amino-terminal residue is optionally acetylated, biotinylated, or 4-pentynoylated, or PEGylated; and
the carboxy-terminal residue is optionally amidated.

2. The composition of matter of claim 1, wherein one or more of Xₐₐ¹⁴, Xₐₐ¹⁶, or Xₐₐ²² is an acidic amino acid residue.

3. The composition of matter of claim 2, wherein the acidic amino acid residue is selected from Glu, Asp, phosphoserine, phosphotyrosine, and gamma-carboxyglutamic acid residues.

4. The composition of matter of claims 1-3, wherein Xₐₐ¹⁴, Xₐₐ¹⁶, or Xₐₐ²² is a Glu residue.

5. The composition of matter of any of claims 2-4, wherein Xₐₐ³⁰ is an Ile, Trp, or Tyr residue.

6. The composition of matter of claim 1, wherein Xₐₐ²² is a basic or neutral hydrophilic amino acid residue or an Ala or Val residue.

7. The composition of matter of claim 6, wherein Xₐₐ²² is selected from histidine, lysine, homolysine, ornithine, arginine, N-methyl-arginine, ω-aminoarginine, ω-methyl-arginine, 1-methyl-histidine, 3-methyl-histidine, homoarginine, Ala, Cit, or Val residues, and Xₐₐ³⁰ is selected from Glu, Asp, phosphoserine, phosphotyrosine, and gamma-carboxyglutamic acid residues.

8. The composition of matter of claim 1, wherein Xₐₐ²² is an Arg residue, a Cit residue, a Val residue, or Ala residue, and Xₐₐ³⁰ is a Glu residue.

9. The composition of matter of any of claim 6 or claim 7, wherein Xₐₐ³⁰ is selected from Glu, Asp, phosphoserine, phosphotyrosine, and gamma-carboxyglutamic acid residues.

10. The composition of matter of claim 9, wherein Xₐₐ³⁰ is a Glu residue.

11. The composition of matter of claims 1-10, wherein Xₐₐ²⁸ is a Cit residue.

12. The composition of matter of claims 1-11, wherein Xₐₐ³¹ is an Ile, Trp, Cha, Phe, BhPhe, or Tyr residue.

13. The composition of matter of claims 1-12, wherein Xₐₐ¹ is a Pra, Aha, Abu, Nva, Nle, Sar, hLeu, hPhe, D-Leu, D-Phe, D-Ala, bAla, AllylG, CyA, or Atz residue.

14. The composition of matter of claims 1-13, wherein Xₐₐ¹ is absent; or Xₐₐ¹ is any amino acid residue; and
Xₐₐ² is any hydrophobic or acidic amino acid residue, or a Pra, hPra, bhPra, ethynylphenylalanine (EPA), (S)-2-amino-4-hexynoic acid, Aha, Abu, Nva, Nle, Sar, hLeu, hPhe, D-Leu, D-Phe, D-Ala, bAla, AllylG, CyA, or Atz residue.

15. The composition of matter of claim 14, wherein Xₐₐ²⁰ is a Gly or Ala residue.

16. The composition of matter of claims 14-15, wherein Xₐₐ⁶ is a basic amino acid residue.

17. The composition of matter of claims 14-16, wherein Xₐₐ² is a Pra, hPra, bhPra, EPA, Aha, (S)-2-amino-4-hexynoic acid, Abu, Nva, Nle, Sar, hLeu, hPhe, D-Leu, D-Phe, D-Ala, bAla, AllylG, CyA, Atz, Ala, Phe, Ile, Leu, Met, Val, Trp, Tyr, proline, thiaproline, methionine, glycine, 1-Nal, 2-Nal, 1′NMe-Trp, cyclopentylglycine (Cpg), phenylglycine, N-methylleucine, N-methylphenylalanine, N-methylvaline, cyclohexylglycine (Chg), cyclohexylalanine (Cha), 2-chloro-phenylalanine, 4-chloro-phenylalanine, 3,4-dichlorophenylalanine, 4-trifluoromethyl-phenylalanine, or 4-phenyl-phenylalanine (Bip) residue.

18. The composition of matter of claims 14-16, wherein Xₐₐ² is an acidic amino acid residue.

19. The composition of matter of claims 14-18, wherein Xₐₐ³⁰ is an acidic amino acid residue.

20. The composition of matter of claims 14-18, wherein Xₐₐ³⁰ is an Ile, Trp, Tyr, 5-bromoTrp, 6-bromoTrp, 5-chloroTrp, 6-chloroTrp, 1-Nal, 2-Nal, thioTrp, 1-Nal, or 2-Nal residue.

21. The composition of matter of claims 14-20, wherein Xₐₐ³ is an acidic amino acid residue.

22. The composition of matter of claims 14-20, wherein Xₐₐ¹³ is an acidic amino acid residue.

23. The composition of matter of claims 14-20, wherein Xₐₐ¹⁴ is an acidic amino acid residue.

24. The composition of matter of claims 14-20, wherein Xₐₐ¹⁵ is a Cit residue.

25. The composition of matter of claims 14-20, wherein Xₐₐ¹⁶ is an acidic amino acid residue.

26. The composition of matter of claims 14-20, wherein Xₐₐ¹⁹ is an acidic amino acid residue.

27. The composition of matter of claims 14-20, wherein Xₐₐ²² is a neutral hydrophilic amino acid residue, a Val residue, or an Ala residue.

28. The composition of matter of claims 14-20, wherein Xₐₐ²⁴ is a neutral hydrophilic amino acid residue.

29. The composition of matter of claims 14-20, wherein Xₐₐ²⁸ is a neutral hydrophilic amino acid residue.

30. The composition of matter of any of claims 14-29, wherein Xₐₐ³⁰ is an Ile, Trp, or Tyr residue.

31. The composition of matter of claims 1-30, wherein Xₐₐ⁸ is an Nle or Leu residue.

32. The composition of matter of claims 1-31, wherein the carboxy-terminal residue is amidated.

33. The composition of matter of claim 1, comprising an amino acid sequence selected from SEQ ID NO:63, SEQ ID NO:69, SEQ ID NO:110, SEQ ID NO:111, SEQ ID NO:112, SEQ ID NO:113, SEQ ID NO:114, SEQ ID NO:115, SEQ ID NO:131, SEQ ID NO:137, SEQ ID NO:139, SEQ ID NO:140, SEQ ID NO:141, SEQ ID NO:142, SEQ ID NO:143, SEQ ID NO:144, SEQ ID NO:145, SEQ ID NO:146, SEQ ID NO:147, SEQ ID NO:149, SEQ ID NO:150, SEQ ID NO:152, SEQ ID NO:153, SEQ ID NO:154, SEQ ID NO:157, SEQ ID NO:159, SEQ ID NO:160, SEQ ID NO:161, SEQ ID NO:162, SEQ ID NO:163, SEQ ID NO:164, SEQ ID NO:165, SEQ ID NO:166, SEQ ID NO:167, SEQ ID NO:168, SEQ ID NO:169, SEQ ID NO:170, SEQ ID NO:171, SEQ ID NO:172, SEQ ID NO:174, SEQ ID NO:175, SEQ ID NO:177, SEQ ID NO:178, SEQ ID NO:179, SEQ ID NO:182, SEQ ID NO:184, SEQ ID NO:185, SEQ ID NO:186, SEQ ID NO:187, SEQ ID NO:188, SEQ ID NO:189, SEQ ID NO:190, SEQ ID NO:191, SEQ ID NO:192, SEQ ID NO:193, SEQ ID NO:194, SEQ ID NO:195, SEQ ID NO:196, SEQ ID NO:197, SEQ ID NO:198, SEQ ID NO:199, SEQ ID NO:200, SEQ ID NO:201, SEQ ID NO:202, SEQ ID NO:203, SEQ ID NO:204, SEQ ID NO:205, SEQ ID NO:206, SEQ ID NO:207, SEQ ID NO:208, SEQ ID NO:209, SEQ ID NO:210, SEQ ID NO:211, SEQ ID NO:212, SEQ ID NO:213, SEQ ID NO:214, SEQ ID NO:215, SEQ ID NO:216, SEQ ID NO:217, SEQ ID NO:218, SEQ ID NO:219, SEQ ID NO:220, SEQ ID NO:221, SEQ ID NO:222, SEQ ID NO:223, SEQ ID NO:224, SEQ ID NO:225, SEQ ID NO:226, SEQ ID NO:227, SEQ ID NO:228, SEQ ID NO:229, SEQ ID NO:230, SEQ ID NO:231, SEQ ID NO:232, SEQ ID NO:233, SEQ ID NO:234, SEQ ID NO:235, SEQ ID NO:236, SEQ ID NO:237, SEQ ID NO:238, SEQ ID NO:239, SEQ ID NO:240, SEQ ID NO:241, SEQ ID NO:242, SEQ ID NO:243, SEQ ID NO:244, SEQ ID NO:245, SEQ ID NO:246, SEQ ID NO:273, SEQ ID NO:274, SEQ ID NO:277, SEQ ID NO:279, SEQ ID NO:284, SEQ ID NO:285, SEQ ID NO:286, SEQ ID NO:287, SEQ ID NO:288, SEQ ID NO:289, SEQ ID NO:290, SEQ ID NO:291, SEQ ID NO:292, SEQ ID NO:293, SEQ ID NO:294, SEQ ID NO:295, SEQ ID NO:297, SEQ ID NO:298, SEQ ID NO:299, SEQ ID NO:300, SEQ ID NO:301, SEQ ID NO:302, SEQ ID NO:303, SEQ ID NO:304, SEQ ID NO:305, SEQ ID NO:306, SEQ ID NO:307, SEQ ID NO:308, SEQ ID NO:309, SEQ ID NO:310, SEQ ID NO:311, SEQ ID NO:312, SEQ ID NO:313, SEQ ID NO:314, SEQ ID NO:315, SEQ ID NO:316, SEQ ID NO:317, SEQ ID NO:318, SEQ ID NO:319, SEQ ID NO:320, SEQ ID NO:321, SEQ ID NO:322, SEQ ID NO:323, SEQ ID NO:324, SEQ ID NO:325, SEQ ID NO:326, SEQ ID NO:327, SEQ ID NO:328, SEQ ID NO:329, SEQ ID NO:330, SEQ ID NO:331, SEQ ID NO:332, SEQ ID NO:333, SEQ ID NO:334, SEQ ID NO:335, SEQ ID NO:336, SEQ ID NO:337, SEQ ID NO:338, SEQ ID NO:339, SEQ ID NO:340, SEQ ID NO:341, SEQ ID NO:342, SEQ ID NO:343, SEQ ID NO:344, SEQ ID NO:345, SEQ ID NO:346, SEQ ID NO:347, SEQ ID NO:348, SEQ ID NO:349, SEQ ID NO:350, SEQ ID NO:351, SEQ ID NO:352, SEQ ID NO:353, SEQ ID NO:354, SEQ ID NO:355, SEQ ID NO:356, SEQ ID NO:392, SEQ ID NO:393, SEQ ID NO:394, SEQ ID NO:395, SEQ ID NO:396, SEQ ID NO:397, SEQ ID NO:406, SEQ ID NO:407, SEQ ID NO:408, SEQ ID NO:409, SEQ ID NO:411, SEQ ID NO:412, SEQ ID NO:413, SEQ ID NO:414, SEQ ID NO:415, SEQ ID NO:416, SEQ ID NO:417, SEQ ID NO:418, SEQ ID NO:419, SEQ ID NO:420, SEQ ID NO:421, SEQ ID NO:422, SEQ ID NO:426, SEQ ID NO:435, SEQ ID NO:436, SEQ ID NO:437, SEQ ID NO:439, SEQ ID NO:440, SEQ ID NO:441, SEQ ID NO:442, SEQ ID NO:443, SEQ ID NO:444, SEQ ID NO:445, SEQ ID NO:447, SEQ ID NO:448, SEQ ID NO:449, SEQ ID NO:450, SEQ ID NO:451, SEQ ID NO:452, SEQ ID NO:455, SEQ ID NO:456, SEQ ID NO:457, SEQ ID NO:458, SEQ ID NO:459, SEQ ID NO:460, SEQ ID NO:461, SEQ ID NO:462, SEQ ID NO:463, SEQ ID NO:464, SEQ ID NO:465, SEQ ID NO:466, SEQ ID NO:467, SEQ ID NO:468, SEQ ID NO:469, SEQ ID NO:470, SEQ ID NO:471, SEQ ID NO:472, SEQ ID NO:473, SEQ ID NO:474, SEQ ID NO:475, SEQ ID NO:518, SEQ ID NO:520, SEQ ID NO:521, SEQ ID NO:523, SEQ ID NO:524, SEQ ID NO:526, SEQ ID NO:527, SEQ ID NO:546, SEQ ID NO:547, SEQ ID NO:548, SEQ ID NO:549, SEQ ID NO:550, SEQ ID NO:551, SEQ ID NO:552, SEQ ID NO:553, SEQ ID NO:554, SEQ ID NO:555, SEQ ID NO:556, SEQ ID NO:557, SEQ ID NO:558, SEQ ID NO:559, SEQ ID NO:560, SEQ ID NO:561, SEQ ID NO:562, SEQ ID NO:563, SEQ ID NO:565, SEQ ID NO:566, SEQ ID NO:568, SEQ ID NO:573, SEQ ID NO:574, SEQ ID NO:576, SEQ ID NO:577, SEQ ID NOS: 578-588, SEQ ID NO:597, SEQ ID NO:605, SEQ ID NO:614, SEQ ID NO:615, SEQ ID NO:635, SEQ ID NO:636, SEQ ID NO:640, SEQ ID NO:641, SEQ ID NO:642, SEQ ID NO:643, SEQ ID NO:644, SEQ ID NO:645, SEQ ID NO:657, SEQ ID NO:667, SEQ ID NO:687, SEQ ID NO:688, SEQ ID NOS: 692-697, SEQ ID NO:701, SEQ ID NO:702, SEQ ID NO:707, SEQ ID NO:708, SEQ ID NO:709, SEQ ID NOS: 714-718, SEQ ID NO:721, SEQ ID NO:723, SEQ ID NOS: 726-729, SEQ ID NOS: 731-757, SEQ ID NOS: 764-785, SEQ ID NO:789, SEQ ID NO:790, SEQ ID NO:791, SEQ ID NOS: 795-801, SEQ ID NO:803, SEQ ID NO:804, SEQ ID NO:805, SEQ ID NO:807, SEQ ID NO:808, SEQ ID NO:809, SEQ ID NO:814, SEQ ID NOS: 816-824, SEQ ID NO:828, SEQ ID NO:829, SEQ ID NO:831, SEQ ID NO:833, SEQ ID NOS: 835-870, SEQ ID NOS: 873-885, SEQ ID NOS: 888-909, SEQ ID NO:911, SEQ ID NO:912, SEQ ID NO:913, SEQ ID NO:923, SEQ ID NO:924, SEQ ID NO:925, SEQ ID NO:929, SEQ ID NO:930, SEQ ID NO:931, SEQ ID NOS: 941-984, SEQ ID NOS: 986-1033, SEQ ID NOS: 1136-1188, SEQ ID NOS: 1190-1242, SEQ ID NO:1350, SEQ ID NO:1351, SEQ ID NO:1352, SEQ ID NO:1353, SEQ ID NOS: 1358-1369, SEQ ID NOS: 1382-1393, SEQ ID NOS: 1406-1417, SEQ ID NO:1430, SEQ ID NOS: 1432-1443, SEQ ID NOS: 1456-1467, SEQ ID NOS: 1480-1491, SEQ ID NOS: 1510-1515, SEQ ID NOS: 1522-1527, SEQ ID NOS: 1534-1611, SEQ ID NO:1613, SEQ ID NOS: 1615-1640, SEQ ID NO:1644, SEQ ID NO:1645, and SEQ ID NOS: 1649-1694.

34. The composition of matter of claim 1, comprising an amino acid sequence selected from SEQ ID NO:715, SEQ ID NO:728, SEQ ID NO:732, SEQ ID NO:735, SEQ ID NO:737, SEQ ID NO:742, SEQ ID NO:744, SEQ ID NO:746, SEQ ID NO:747, SEQ ID NO:748, SEQ ID NO:749, SEQ ID NO:753, SEQ ID NO:754, SEQ ID NO:755, SEQ ID NO:756, SEQ ID NO:757, SEQ ID NO:835, SEQ ID NO:836, SEQ ID NO:837, SEQ ID NO:953, SEQ ID NO:954, SEQ ID NO:955, SEQ ID NO:956, SEQ ID NO:957, SEQ ID NO:969, SEQ ID NO:970, SEQ ID NO:971, SEQ ID NO:972, SEQ ID NO:973, SEQ ID NO:974, SEQ ID NO:975, SEQ ID NO:976, SEQ ID NO:977, SEQ ID NO:978, SEQ ID NO:979, SEQ ID NO:980, SEQ ID NO:981, SEQ ID NO:982, SEQ ID NO:983, SEQ ID NO:984, SEQ ID NO:1002, SEQ ID NO:1003, SEQ ID NO:1004, SEQ ID NO:1005, SEQ ID NO:1006, SEQ ID NO:1018, SEQ ID NO:1019, SEQ ID NO:1020, SEQ ID NO:1021, SEQ ID NO:1022, SEQ ID NO:1023, SEQ ID NO:1024, SEQ ID NO:1025, SEQ ID NO:1026, SEQ ID NO:1027, SEQ ID NO:1028, SEQ ID NO:1029, SEQ ID NO:1030, SEQ ID NO:1031, SEQ ID NO:1032, SEQ ID NO:1137, SEQ ID NO:1157, SEQ ID NO:1158, SEQ ID NO:1159, SEQ ID NO:1160, SEQ ID NO:1161, SEQ ID NO:1173, SEQ ID NO:1174, SEQ ID NO:1175, SEQ ID NO:1176, SEQ ID NO:1177, SEQ ID NO:1178, SEQ ID NO:1179, SEQ ID NO:1180, SEQ ID NO:1181, SEQ ID NO:1182, SEQ ID NO:1183, SEQ ID NO:1184, SEQ ID NO:1185, SEQ ID NO:1186, SEQ ID NO:1187, SEQ ID NO:1188, SEQ ID NO:1191, SEQ ID NO:1211, SEQ ID NO:1212, SEQ ID NO:1213, SEQ ID NO:1214, SEQ ID NO:1225, SEQ ID NO:1227, SEQ ID NO:1228, SEQ ID NO:1229, SEQ ID NO:1230, SEQ ID NO:1231, SEQ ID NO:1232, SEQ ID NO:1233, SEQ ID NO:1234, SEQ ID NO:1235, SEQ ID NO:1236, SEQ ID NO:1237, SEQ ID NO:1238, SEQ ID NO:1239, SEQ ID NO:1240, SEQ ID NO:1241, SEQ ID NO:1242, SEQ ID NO:1351, SEQ ID NO:1353, SEQ ID NO:1360, SEQ ID NO:1362, SEQ ID NO:1363, SEQ ID NO:1366, SEQ ID NO:1368, SEQ ID NO:1369, SEQ ID NO:1384, SEQ ID NO:1386, SEQ ID NO:1387, SEQ ID NO:1390, SEQ ID NO:1392, SEQ ID NO:1393, SEQ ID NO:1408, SEQ ID NO:1410, SEQ ID NO:1411, SEQ ID NO:1414, SEQ ID NO:1416, SEQ ID NO:1417, SEQ ID NO:1434, SEQ ID NO:1436, SEQ ID NO:1437, SEQ ID NO:1440, SEQ ID NO:1442, SEQ ID NO:1443, SEQ ID NO:1458, SEQ ID NO:1460, SEQ ID NO:1461, SEQ ID NO:1464, SEQ ID NO:1466, SEQ ID NO:1467, SEQ ID NO:1482, SEQ ID NO:1484, SEQ ID NO:1485, SEQ ID NO:1488, SEQ ID NO:1490, SEQ ID NO:1491, SEQ ID NO:1628, SEQ ID NO:1629, SEQ ID NO:1673, SEQ ID NO:1674, SEQ ID NO:1677, SEQ ID NO:1678, SEQ ID NO:1683, SEQ ID NO:1686, and SEQ ID NO:1687.

35. The composition of matter of claim 1, comprising an amino acid sequence selected from SEQ ID NO:717, SEQ ID NO:733, SEQ ID NO:738, SEQ ID NO:740, SEQ ID NO:743, SEQ ID NO:745, SEQ ID NO:747, SEQ ID NO:749, SEQ ID NO:750, SEQ ID NO:751, SEQ ID NO:752, SEQ ID NO:753, SEQ ID NO:755, SEQ ID NO:756, SEQ ID NO:757, SEQ ID NO:770, SEQ ID NO:771, SEQ ID NO:773, SEQ ID NO:958, SEQ ID NO:959, SEQ ID NO:960, SEQ ID NO:961, SEQ ID NO:962, SEQ ID NO:963, SEQ ID NO:1138, SEQ ID NO:1162, SEQ ID NO:1163, SEQ ID NO:1164, SEQ ID NO:1165, SEQ ID NO:1166, SEQ ID NO:1167, SEQ ID NO:1192, SEQ ID NO:1361, SEQ ID NO:1367, SEQ ID NO:1385, SEQ ID NO:1391, SEQ ID NO:1409, SEQ ID NO:1415, SEQ ID NO:1430, SEQ ID NO:1435, SEQ ID NO:1441, SEQ ID NO:1459, SEQ ID NO:1465, SEQ ID NO:1483, SEQ ID NO:1489, SEQ ID NO:1596, SEQ ID NO:1597, SEQ ID NO:1598, SEQ ID NO:1600, SEQ ID NO:1602, SEQ ID NO:1645, and SEQ ID NO:1694.

36. The composition of matter of claim 1, comprising an amino acid sequence selected from SEQ ID NO:1137, SEQ ID NO:1157, SEQ ID NO:1158, SEQ ID NO:1159, SEQ ID NO:1160, SEQ ID NO:1161, SEQ ID NO:1173, SEQ ID NO:1174, SEQ ID NO:1175, SEQ ID NO:1176, SEQ ID NO:1177, SEQ ID NO:1178, SEQ ID NO:1179, SEQ ID NO:1180, SEQ ID NO:1181, SEQ ID NO:1182, SEQ ID NO:1183, SEQ ID NO:1184, SEQ ID NO:1185, SEQ ID NO:1186, SEQ ID NO:1187, SEQ ID NO:1188, SEQ ID NO:1191, SEQ ID NO:1211, SEQ ID NO:1212, SEQ ID NO:1213, SEQ ID NO:1214, SEQ ID NO:1215, SEQ ID NO:1227, SEQ ID NO:1228, SEQ ID NO:1229, SEQ ID NO:1230, SEQ ID NO:1231, SEQ ID NO:1232, SEQ ID NO:1233, SEQ ID NO:1234, SEQ ID NO:1235, SEQ ID NO:1236, SEQ ID NO:1237, SEQ ID NO:1238, SEQ ID NO:1239, SEQ ID NO:1240, SEQ ID NO:1241, SEQ ID NO:1242, SEQ ID NO:1351, SEQ ID NO:1353, SEQ ID NO:1360, SEQ ID NO:1362, SEQ ID NO:1363, SEQ ID NO:1366, SEQ ID NO:1368, SEQ ID NO:1369, SEQ ID NO:1384, SEQ ID NO:1386, SEQ ID NO:1387, SEQ ID NO:1390, SEQ ID NO:1392, SEQ ID NO:1393, SEQ ID NO:1408, SEQ ID NO:1410, SEQ ID NO:1411, SEQ ID NO:1414, SEQ ID NO:1416, SEQ ID NO:1417, SEQ ID NO:1434, SEQ ID NO:1436, SEQ ID NO:1437, SEQ ID NO:1440, SEQ ID NO:1442, SEQ ID NO:1443, SEQ ID NO:1458, SEQ ID NO:1460, SEQ ID NO:1461, SEQ ID NO:1464, SEQ ID NO:1466, SEQ ID NO:1467, SEQ ID NO:1482, SEQ ID NO:1484, SEQ ID NO:1485, SEQ ID NO:1488, SEQ ID NO:1490, SEQ ID NO:1491, and SEQ ID NO:1629.

37. The composition of matter of claim 1, comprising an amino acid sequence selected from SEQ ID NO:1138, SEQ ID NO:1162, SEQ ID NO:1163, SEQ ID NO:1164, SEQ ID NO:1165, SEQ ID NO:1166, SEQ ID NO:1167, SEQ ID NO:1192, SEQ ID NO:1361, SEQ ID NO:1367, SEQ ID NO:1385, SEQ ID NO:1391, SEQ ID NO:1409, SEQ ID NO:1415, SEQ ID NO:1430, SEQ ID NO:1435, SEQ ID NO:1441, SEQ ID NO:1459, SEQ ID NO:1465, SEQ ID NO:1483, and SEQ ID NO:1489.

38. The composition of matter of claim 1, comprising an isolated polypeptide comprising the amino acid sequence of the formula:
Xₐₐ¹Xₐₐ²Xₐₐ³Xₐₐ⁴Xₐₐ⁵Xₐₐ⁶Xₐₐ⁷Xₐₐ⁸Xₐₐ⁹Xₐₐ¹⁰Xₐₐ¹¹Aspₐₐ¹²Xₐₐ¹³Xₐₐ¹⁴Argₐₐ¹⁵Xₐₐ¹⁶Xₐₐ¹⁷Xₐₐ¹⁸Xₐₐ¹⁹Xₐₐ²⁰Leuₐₐ²¹Xₐₐ²²Xₐₐ²³Xₐₐ²⁴Xₐₐ²⁵Xₐₐ²⁶Xₐₐ²⁷Xₐₐ²⁸Xₐₐ²⁹Xₐₐ³⁰Xₐₐ³¹Xₐₐ³²Xₐₐ³³Xₐₐ³⁴//SEQ ID NO:516
or a pharmaceutically acceptable salt thereof,
wherein:
Xₐₐ¹Xₐₐ² is absent; or Xₐₐ¹ is any amino acid residue and Xₐₐ² is any amino acid residue; or
Xₐₐ¹ is absent and Xₐₐ² is any amino acid residue; or Xₐₐ¹ is absent and Xₐₐ² is absent;
Xₐₐ³ is any amino acid residue;
Xₐₐ⁴ is Cys, if Xₐₐ¹⁸ is Cys; or Xₐₐ⁴ is SeCys, if Xₐₐ¹⁸ is SeCys;
Xₐₐ⁵ is any neutral hydrophilic or basic amino acid residue;
Xₐₐ⁶ is any basic amino acid residue;
Xₐₐ⁷ is a Trp, 5-bromoTrp, 6-bromoTrp, 5-chloroTrp, 6-chloroTrp, 1-Nal, 2-Nal, or thioTrp residue;
Xₐₐ⁸ is a Met, Nle, Nva, Leu, Ile, Val, or Phe residue;
Xₐₐ⁹ is a Trp, 5-bromoTrp, 6-bromoTrp, 5-chloroTrp, 6-chloroTrp, 1-Nal, 2-Nal, or thioTrp residue;
Xₐₐ¹⁰ is a basic or neutral hydrophilic amino acid residue, or an Ala residue;
Xₐₐ¹¹ is Cys if Xₐₐ²³ is Cys; or Xₐₐ¹¹ is SeCys if Xₐₐ²³ is SeCys;
Xₐₐ¹³ is any amino acid residue except a hydrophobic residue;
Xₐₐ¹⁴ is a basic residue or an Ala residue;
Xₐₐ¹⁶ is any amino acid residue;
Xₐₐ¹⁷ is a Cys if Xₐₐ²⁷ is Cys; or Xₐₐ¹⁷ is a SeCys if Xₐₐ²⁷ is SeCys;
Xₐₐ¹⁸ is a Cys or SeCys;
Xₐₐ¹⁹ is any amino acid residue;
Xₐₐ²⁰ is a Gly or Ala residue;
Xₐₐ²² is an acidic, basic amino acid residue, or Ala residue;
Xₐₐ²³ is a Cys or SeCys residue;
Xₐₐ²⁴ is a basic amino acid or Ala residue;
Xₐₐ²⁶ is a Trp, 5-bromoTrp, 6-bromoTrp, 5-chloroTrp, 6-chloroTrp, 1-Nal, 2-Nal, or thioTrp residue;
Xₐₐ²⁷ is a Cys or SeCys residue;
Xₐₐ²⁸ is a basic amino acid residue;
Xₐₐ²⁹ is a basic amino acid residue;
Xₐₐ³⁰ is an Ile, Trp, Tyr, 5-bromoTrp, 6-bromoTrp, 5-chloroTrp, 6-chloroTrp, 1-Nal, 2-Nal, thioTrp, 1-Nal, or 2-Nal residue, if Xₐₐ²² is an acidic amino acid residue; or
Xₐₐ³⁰ is an acidic amino acid residue, if Xₐₐ²² is a basic amino acid residue or an Ala residue;
Xₐₐ³¹ is an Ile, Trp, Tyr, 5-bromoTrp, 6-bromoTrp, 5-chloroTrp, 6-chloroTrp, 1-Nal, 2-Nal, thioTrp, 1-Nal, or 2-Nal residue;
each of Xₐₐ³², Xₐₐ³³, and Xₐₐ³⁴ is independently absent or is independently a hydrophobic amino acid residue;
and wherein:
if Xₐₐ⁴ and Xₐₐ¹⁸ are both Cys residues, there is a disulfide bond between residue Xₐₐ⁴ and residue Xₐₐ¹⁸; or if Xₐₐ⁴ and Xₐₐ¹⁸ are both SeCys residues, there is a diselenide bond between residue Xₐₐ⁴ and residue Xₐₐ¹⁸;
if Xₐₐ¹¹ and Xₐₐ²³ are both Cys residues, there is a disulfide bond between residue Xₐₐ¹¹ and residue Xₐₐ²³; or if Xₐₐ¹¹ and Xₐₐ²³ are both SeCys residues, there is a diselenide bond between residue Xₐₐ¹¹ and residue Xₐₐ²³;
if Xₐₐ¹⁷ and Xₐₐ²⁷ are both Cys residues, there is a disulfide bond between residue Xₐₐ¹⁷ and residue Xₐₐ²⁷; or if Xₐₐ¹⁷ and Xₐₐ²⁷ are both SeCys residues, there is a diselenide bond between residue Xₐₐ¹⁷ and residue Xₐₐ²⁷;
the amino-terminal residue is optionally acetylated, biotinylated, or 4-pentynoylated, or PEGylated; and
the carboxy-terminal residue is optionally amidated.

39. The composition of matter of claim 38, wherein Xₐₐ²² is an acidic amino acid residue.

40. The composition of matter of claim 38, wherein Xₐₐ²² is a basic amino acid residue or an Ala residue; and Xₐₐ³⁰ is selected from Glu, Asp, phosphoserine, phosphotyrosine, and gamma-carboxyglutamic acid residues.

41. The composition of matter of claim 40, wherein Xₐₐ³⁰ is a Glu residue.

42. The composition of matter of claims 38-41, wherein the carboxy-terminal residue is amidated.

43. The composition of matter of claim 1, wherein the composition of matter comprises an isolated polypeptide comprising the amino acid sequence of the formula:
Xₐₐ¹Xₐₐ²Xₐₐ³Xₐₐ⁴Xₐₐ⁵Xₐₐ⁶Xₐₐ⁷Xₐₐ⁸Xₐₐ⁹Xₐₐ¹⁰Xₐₐ¹¹Aspₐₐ¹²Xₐₐ¹³Xₐₐ¹⁴Argₐₐ¹⁵Xₐₐ¹⁶Xₐₐ¹⁷Xₐₐ¹⁸Xₐₐ¹⁹Xₐₐ²⁰Leuₐₐ²¹Xₐₐ²²Xₐₐ²³Xₐₐ²⁴Leuₐₐ²⁵Xₐₐ²⁶Xₐₐ²⁷Xₐₐ²⁸Xₐₐ²⁹Xₐₐ³⁰Xₐₐ³¹Xₐₐ³²Xₐₐ³³Xₐₐ³⁴//SEQ ID NO:517
or a pharmaceutically acceptable salt thereof,
wherein:
Xₐₐ¹ is absent; or Xₐₐ¹ is any amino acid residue;
Xₐₐ² is any hydrophobic amino acid residue, or a Pra, Aha, Abu, Nva, Nle, Sar, hLeu, hPhe, D-Leu, D-Phe, D-Ala, bAla, AllylG, CyA, or Atz residue;
Xₐₐ³ is any amino acid residue;
Xₐₐ⁴ is Cys, if Xₐₐ¹⁸ is Cys; or Xₐₐ⁴ is SeCys, if Xₐₐ¹⁸ is SeCys;
Xₐₐ⁵ is any neutral hydrophilic or basic amino acid residue;
Xₐₐ⁶ is any basic amino acid residue;
Xₐₐ⁷ is a Trp, 5-bromoTrp, 6-bromoTrp, 5-chloroTrp, 6-chloroTrp, 1-Nal, 2-Nal, or thioTrp residue;
Xₐₐ⁸ is a Leu or Nle residue;
Xₐₐ⁹ is a Trp, 5-bromoTrp, 6-bromoTrp, 5-chloroTrp, 6-chloroTrp, 1-Nal, 2-Nal, or thioTrp residue;
Xₐₐ¹⁰ is a basic or neutral hydrophilic amino acid residue, or an Ala residue;
Xₐₐ¹¹ is Cys if Xₐₐ²³ is Cys; or Xₐₐ¹¹ is SeCys if Xₐₐ²³ is SeCys;
Xₐₐ¹³ is any amino acid residue except a hydrophobic residue;
Xₐₐ¹⁴ is a basic residue or an Ala residue;
Xₐₐ¹⁶ is any amino acid residue;
Xₐₐ¹⁷ is a Cys if Xₐₐ²⁷ is Cys; or Xₐₐ¹⁷ is a SeCys if Xₐₐ²⁷ is SeCys;
Xₐₐ¹⁸ is a Cys or SeCys;
Xₐₐ¹⁹ is any amino acid residue;
Xₐₐ²⁰ is a Gly or Ala residue;
Xₐₐ²² is a basic amino acid residue or Ala residue;
Xₐₐ²³ is a Cys or SeCys residue;
Xₐₐ²⁴ is a basic amino acid residue or Ala residue;
Xₐₐ²⁶ is a Trp, 5-bromoTrp, 6-bromoTrp, 5-chloroTrp, 6-chloroTrp, 1-Nal, 2-Nal, or thioTrp residue;
Xₐₐ²⁷ is a Cys or SeCys residue;
Xₐₐ²⁸ is a basic amino acid residue;
Xₐₐ²⁹ is a basic amino acid residue;
Xₐₐ³⁰ is an Ile, Trp, Tyr, 5-bromoTrp, 6-bromoTrp, 5-chloroTrp, 6-chloroTrp, 1-Nal, 2-Nal, thioTrp, 1-Nal, or 2-Nal residue;
Xₐₐ³¹ is an Ile, Trp, Tyr, 5-bromoTrp, 6-bromoTrp, 5-chloroTrp, 6-chloroTrp, 1-Nal, 2-Nal, thioTrp, 1-Nal, or 2-Nal residue;
each of Xₐₐ³², Xₐₐ³³, and Xₐₐ³⁴ is independently absent or is independently a hydrophobic amino acid residue;
and wherein:
if Xₐₐ⁴ and Xₐₐ¹⁸ are both Cys residues, there is a disulfide bond between residue Xₐₐ⁴ and residue Xₐₐ¹⁸; or if Xₐₐ⁴ and Xₐₐ¹⁸ are both SeCys residues, there is a diselenide bond between residue Xₐₐ⁴ and residue Xₐₐ¹⁸;
if Xₐₐ¹¹ and Xₐₐ²³ are both Cys residues, there is a disulfide bond between residue Xₐₐ¹¹ and residue Xₐₐ²³; or if Xₐₐ¹¹ and Xₐₐ²³ are both SeCys residues, there is a diselenide bond between residue Xₐₐ¹¹ and residue Xₐₐ²³;
if Xₐₐ¹⁷ and Xₐₐ²⁷ are both Cys residues, there is a disulfide bond between residue Xₐₐ¹⁷ and residue Xₐₐ²⁷; or if Xₐₐ¹⁷ and Xₐₐ²⁷ are both SeCys residues, there is a diselenide bond between residue Xₐₐ¹⁷ and residue Xₐₐ²⁷;
the amino-terminal residue is optionally acetylated, biotinylated, or 4-pentynoylated, or PEGylated; and
the carboxy-terminal residue is optionally amidated.

44. The composition of matter of claim 43, wherein Xₐₐ² is a Pra, Aha, Abu, Nva, Nle, Sar, hLeu, hPhe, D-Leu, D-Phe, D-Ala, bAla, AllylG, CyA, Atz, Ala, Phe, Ile, Leu, Met, Val, Trp, Tyr, proline, thiaproline, methionine, glycine, 1-Nal, 2-Nal, 1′NMe-Trp, cyclopentylglycine (Cpg), phenylglycine, N-methylleucine, N-methylphenylalanine, N-methylvaline, cyclohexylglycine (Chg), cyclohexylalanine (Cha), 2-chloro-phenylalanine, 4-chloro-phenylalanine, 3,4-dichlorophenylalanine, 4-trifluoromethyl-phenylalanine, or 4-phenyl-phenylalanine (Bip) residue.

45. The composition of matter of any of claims 43-44, wherein Xₐₐ³⁰ is an Ile, Trp, or Tyr residue.

46. The composition of matter of claims 43-45, wherein the carboxy-terminal residue is amidated.

47. The composition of matter of claim 43, comprising an amino acid sequence selected from SEQ ID NO:247, SEQ ID NO:296, SEQ ID NO:358, SEQ ID NO:360, SEQ ID NO:361, SEQ ID NO:363, SEQ ID NO:364, SEQ ID NO:365, SEQ ID NO:366, SEQ ID NO:367, SEQ ID NO:368, SEQ ID NO:369, SEQ ID NO:370, SEQ ID NO:372, SEQ ID NO:373, SEQ ID NO:374, SEQ ID NO:375, SEQ ID NO:376, SEQ ID NO:377, SEQ ID NO:378, SEQ ID NO:379, SEQ ID NO:380, SEQ ID NO:381, SEQ ID NO:382, SEQ ID NO:383, SEQ ID NO:384, SEQ ID NO:385, SEQ ID NO:386, SEQ ID NO:387, SEQ ID NO:388, SEQ ID NO:389, SEQ ID NO:390, SEQ ID NO:391, SEQ ID NO:398, SEQ ID NO:399, SEQ ID NO:400, SEQ ID NO:401, SEQ ID NO:402, SEQ ID NO:403, SEQ ID NO:404, SEQ ID NO:405, SEQ ID NO:410, SEQ ID NO:423, SEQ ID NO:424, SEQ ID NO:425, SEQ ID NO:427, SEQ ID NO:431, SEQ ID NO:432, SEQ ID NO:433, SEQ ID NO:434, SEQ ID NO:438, SEQ ID NO:446, SEQ ID NO:453, SEQ ID NO:454, SEQ ID NO:571, SEQ ID NO:579, SEQ ID NO:580, SEQ ID NO:581, SEQ ID NO:582, SEQ ID NO:583, SEQ ID NO:584, SEQ ID NO:585, SEQ ID NO:586, SEQ ID NO:587, and SEQ ID NO:588.

48. The composition of matter of any of claims 1-47, further comprising an optional linker moiety and a pharmaceutically acceptable, covalently linked half-life extending moiety.

49. The composition of matter of claim 48, wherein the optional linker moiety is covalently linked at:
(a) the N-terminal residue;
(b) the C-terminal residue; or
(c) Xₐₐ², Xₐₐ³, Xₐₐ¹³, Xₐₐ¹⁶, or Xₐₐ¹⁹.

50. The composition of matter of claims 48-49, wherein the optional linker moiety is a multivalent linker.

51. The composition of matter of claims 48-50, wherein the half-life extending moiety is polyethylene glycol of molecular weight of about 1000 Da to about 100000 Da, an IgG Fc domain, a transthyretin, a human serum albumin, or a lipid or albumin binding peptide.

52. The composition of matter of claims 48-50, wherein the half-life extending moiety comprises a human immunoglobulin or a human immunoglobulin Fc domain, or both.

53. The composition of matter of claim 52 having a configuration as set forth in any of FIG. 81A-C, FIG. 94A-N, FIG. 95, FIG. 96, FIG. 97, or FIG. 98.

54. The composition of matter of claim 52, wherein the composition comprises a monovalent immunoglobulin-peptide or Fc-peptide conjugate.

55. The composition of matter of claim 52, wherein the composition comprises a bivalent immunoglobulin-peptide or Fc-peptide conjugate.

56. The composition of matter of claims 48-50, wherein the composition of matter comprises a human-serum albumin-peptide conjugate.

57. The composition of matter of claims 48-50, wherein the composition of matter comprises a lipidated peptide or serum albumin binding peptide-peptide conjugate.

58. A pharmaceutical composition, comprising the composition of matter of any of claims 1-57, and a pharmaceutically acceptable carrier.

59. A method of preventing pain, comprising administering a prophylactically effective amount of the composition of any of claims 1-58.

60. A method of treating pain, comprising administering a therapeutically effective amount of the composition of any of claims 1-58.

61. The method of claim 60, wherein the pain is chronic pain, acute pain, or persistent pain.

62. The method of claim 61, wherein the chronic pain is associated with cancer, chemotherapy, osteoarthritis, fibromyalgia, primary erythromelalgia, post-herpetic neuralgia, painful diabetic neuropathy, idiopathic painful neuropathy, neuromas, paroxysmal extreme pain disorder, migraine, trigeminal neuralgia, orofacial pain, cluster headaches, complex regional pain syndrome (CRPS), failed back surgery syndrome, sciatica, interstitial cystitis, pelvic pain, lower back pain, inflammation-induced pain, or joint pain.

63. The method of claim 61, wherein the acute or persistent pain is associated with trauma, burn, or surgery.

64. An isolated nucleic acid encoding any of SEQ ID NO:63, SEQ ID NO:69, SEQ ID NO:112, SEQ ID NO:113, SEQ ID NO:115, SEQ ID NO:131, SEQ ID NO:137, SEQ ID NO:193, SEQ ID NO:194, SEQ ID NO:195, SEQ ID NO:196, SEQ ID NO:200, SEQ ID NO:201, SEQ ID NO:202, SEQ ID NO:203, SEQ ID NO:207, SEQ ID NO:208, SEQ ID NO:209, SEQ ID NO:210, SEQ ID NO:214, SEQ ID NO:215, SEQ ID NO:216, SEQ ID NO:217, SEQ ID NO:221, SEQ ID NO:222, SEQ ID NO:223, SEQ ID NO:224, SEQ ID NO:228, SEQ ID NO:229, SEQ ID NO:230, SEQ ID NO:231, SEQ ID NO:235, SEQ ID NO:236, SEQ ID NO:237, SEQ ID NO:238, SEQ ID NO:242, SEQ ID NO:243, SEQ ID NO:244, SEQ ID NO:245, SEQ ID NO:246, SEQ ID NO:277, or SEQ ID NO:279, that does not include a non-canonical amino acid.

65. An expression vector comprising the nucleic acid of claim 64.

66. A recombinant host cell comprising the expression vector of claim 65.
